(19) United States
(12) Patent Application Publication
(10) Pub. No.: US 2023/0287428 A1
(43) Pub. Date: Sep. 14, 2023

(54) BIALLELIC KNOCKOUT OF SARM1

(71) Applicant: EmendoBio Inc., Wilmington, DE (US)

(72) Inventors: Rafi Emmanuel, Ramla (IL); Michal Golan Mashiach, Ness Ziona (IL)

(73) Assignee: EmendoBio Inc., Wilmington, DE (US)

(21) Appl. No.: 17/927,658

(22) PCT Filed: May 27, 2021
(86) PCT No.: PCT/US2021/034583

§ 371 Date: Nov. 23, 2022

Related U.S. Application Data
(60) Provisional application No. 63/036,325, filed on Jun. 8, 2020.
(60) Provisional application No. 63/030,678, filed on May 27, 2020.

(51) Int. Cl. C12N 15/113; C12N 15/10

(52) U.S. Cl. CPC C12N 15/1137; C12N 15/102; C12N 2310/20; C12N 2320/11

(57) ABSTRACT

RNA molecules comprising a guide sequence portion having 17-50 contiguous nucleotides containing nucleotides in the sequence set forth in any one of SEQ ID NOs: 1-12105 and compositions, methods, and uses thereof.

[0001] Throughout this application, various publications are referenced, including referenced in parenthesis. The disclosures of all publications mentioned in this application in their entireties are hereby incorporated by reference into this application in order to provide additional description of the art to which this invention pertains and of the features in the art which can be employed with this invention.

### REFERENCE TO SEQUENCE LISTING

[0002] This application incorporates-by-reference nucleotide sequences which are present in the file named “210527_91408-A-PCT_Sequence _Listing_AWG.txt”, which is 2,585 kilobytes in size, and which was created on May 25, 2021 in the IBM-PC machine format, having an operating system compatibility with MS-Windows, which is contained in the text file filed May 27, 2021 as part of this application.

### BACKGROUND OF INVENTION

[0003] The sterile alpha and TIR motif-containing 1 (SARM1) gene is a NAD+ hydrolase that acts as a negative regulator of MYD88- and TRIF-dependent toll-like receptor signaling pathway by promoting Wallerian degeneration, an injury-induced form of programmed subcellular death which involves degeneration of an axon distal to the injury site. SARM1 can also activate neuronal cell death in response to stress and has a role in retinal structure and function (Molday et al., 2013).

### SUMMARY OF THE INVENTION

[0004] Disclosed are approaches for knocking out the SARM1 gene to inhibit photoreceptor degeneration, thereby persevering photoreceptors in the eye. Accordingly, biallelic knockout of the SARM1 gene in photoreceptor cells as described herein may be utilized to treat, inhibit, prevent, and/or ameliorate any one of retinitis pigmentosa, photoreceptor (rod and cone) degeneration, and age-related macular degeneration.

[0005] The present disclosure also provides a method for inactivating alleles of the sterile alpha and TIR motif-containing 1 (SARM1) gene in a cell, the method comprising
[0006] introducing to the cell a composition comprising:
   [0007] a CRISPR nuclease or a sequence encoding the CRISPR nuclease; and
   [0008] an RNA molecule comprising a guide sequence portion having 17-50 nucleotides or
   [0009] a nucleotide sequence encoding the same,
[0010] wherein a complex of the CRISPR nuclease and the RNA molecule affects a double strand break in the allele of the SARM1 gene.

[0011] According to embodiments of the present invention, there is provided an RNA molecule comprising a guide sequence portion having 17-50 contiguous nucleotides containing nucleotides in the sequence set forth in any one of SEQ ID Nos: 1-12105.

[0012] According to some embodiments of the present invention, there is provided a composition comprising an RNA molecule comprising a guide sequence portion having 17-50 contiguous nucleotides containing nucleotides in the sequence set forth in any one of SEQ ID NOs: 1-12105 and a CRISPR nuclease.

[0013] According to some embodiments of the present invention, there is provided a method for inactivating a SARM1 allele in a cell, the method comprising delivering to the cell a composition comprising an RNA molecule comprising a guide sequence portion having 17-50 contiguous nucleotides containing nucleotides in the sequence set forth in any one of SEQ ID NOs: 1-12105 and a CRISPR nuclease. In some embodiments, the cell is a rod cell. In some embodiments, the cell is a cone cell. In some embodiments, the cell is a photoreceptor cell. In some embodiments, the delivering to the cell is performed in vivo, ex vivo, or in vitro. In some embodiments, the method is performed ex vivo and the cell is provided/explanted from an individual patient. In some embodiments, the method further comprises the step of introducing the resulting cell, with the modified/knocked out SARM1 allele, into the individual patient.

[0014] According to some embodiments of the present invention, there is provided a method for treating and/or preventing retinitis pigmentosa, photoreceptor degeneration, or age-related macular degeneration, the method comprising delivering to a cell of a subject having or at risk of experiencing retinitis pigmentosa, photoreceptor degeneration, or age-related macular degeneration a composition comprising an RNA molecule comprising a guide sequence portion having 17-50 contiguous nucleotides containing nucleotides in the sequence set forth in any one of SEQ ID NOs: 1-12105 and a CRISPR nuclease.

[0015] According to some embodiments of the present invention, there is provided use of a composition comprising an RNA molecule comprising a guide sequence portion having 17-50 contiguous nucleotides containing nucleotides in the sequence set forth in any one of SEQ ID NOs: 1-12105 and a CRISPR nuclease for inactivating a SARM1 allele in a cell, comprising delivering to the cell the composition comprising an RNA molecule comprising a guide sequence portion having 17-50 contiguous nucleotides containing nucleotides in the sequence set forth in any one of SEQ ID NOs: 1-12105 and a CRISPR nuclease.

[0016] According to embodiments of the present invention, there is provided a medicament comprising an RNA molecule comprising a guide sequence portion having 17-50 contiguous nucleotides containing nucleotides in the sequence set forth in any one of SEQ ID NOs: 1-12105 and a CRISPR nuclease for use in inactivating a SARM1 allele in a cell, wherein the medicament is administered by delivering to the cell the composition comprising an RNA molecule comprising a guide sequence portion having 17-50 contiguous nucleotides containing nucleotides in the sequence set forth in any one of SEQ ID NOs: 1-12105 and a CRISPR nuclease.

[0017] According to some embodiments of the present invention, there is provided use of a composition comprising an RNA molecule comprising a guide sequence portion having 17-50 contiguous nucleotides containing nucleotides in the sequence set forth in any one of SEQ ID NOs: 1-12105 and a CRISPR nuclease for treating, ameliorating, or preventing retinitis pigmentosa, photoreceptor degeneration, or age-related macular degeneration, comprising delivering to a cell of a subject having or at risk of experiencing retinitis pigmentosa, photoreceptor degeneration, or age-related macular degeneration the composition of comprising an RNA molecule comprising a guide sequence portion having 17-50 contiguous nucleotides containing nucleotides in the sequence set forth in any one of SEQ ID NOs: 1-12105 and a CRISPR nuclease.

[0018] In some embodiments, the method is performed in vivo and the cell is a photoreceptor cell in the retina of an eye of a subject.

[0019] According to some embodiments of the present invention, there is provided a medicament comprising the composition comprising an RNA molecule comprising a guide sequence portion having 17-50 contiguous nucleotides containing nucleotides in the sequence set forth in any one of SEQ ID NOs: 1-12105 and a CRISPR nuclease for use in treating, ameliorating, or preventing retinitis pigmentosa, photoreceptor degeneration, or age-related macular degeneration, wherein the medicament is administered by delivering to a cell of a subject having or at risk of experiencing retinitis pigmentosa, photoreceptor degeneration, or age-related macular degeneration the composition comprising an RNA molecule comprising a guide sequence portion having 17-50 contiguous nucleotides containing nucleotides in the sequence set forth in any one of SEQ ID NOs: 1-12105 and a CRISPR nuclease.

[0020] According to some embodiments of the present invention, there is provided a kit for inactivating a SARM1 allele in a cell, comprising an RNA molecule comprising a guide sequence portion having 17-50 contiguous nucleotides containing nucleotides in the sequence set forth in any one of SEQ ID NOs: 1-12105, a CRISPR nuclease, and/or a tracrRNA molecule; and instructions for delivering the RNA molecule; CRISPR nuclease, and/or the tracrRNA to the cell.

[0021] According to some embodiments of the present invention, there is provided a kit for treating photoreceptor degeneration in a subject, comprising an RNA molecule comprising a guide sequence portion having 17-50 contiguous nucleotides containing nucleotides in the sequence set forth in any one of SEQ ID NOs: 1-12105, a CRISPR nuclease, and/or a tracrRNA molecule; and instructions for delivering the RNA molecule; CRISPR nuclease, and/or the tracrRNA to a cell of a subject having or at risk of experiencing photoreceptor degeneration.

### BRIEF DESCRIPTION OF THE DRAWINGS

[0022] FIGS. 1A-1B: Screen for activity of RNA guide molecules targeting SARM1 in HeLa cells. Cells were harvested 72h post DNA transfection. Genomic DNA was extracted and used for capillary electrophoreses after amplifying the endogenous genomic regions using on-target primers. The graph represents the average of % editing ± standard deviation (STDV) of three (3) independent experiments. FIG. 1A: An SpCas9 coding plasmid was co-transfected with a plasmid expressing the indicated RNA guide molecule. FIG. 1B: An OMNI-50 or OMNI-79 CRISPR nuclease was co-transfected with the indicated RNA guide molecule.

[0023] FIG. 2: RNPs of a SpCas9 nuclease complexed with a specific RNA guide molecule were electroporated into Neuro-2a cells to determine RNP activity. Cells were harvested 72 hours post DNA electroporation, genomic DNA was extracted, and then analyzed by next-generation sequence (NGS). The graph represents the % of editing ± STDV of two (2) independent electroporations.

[0024] FIG. 3: Relative amount of SARM1 RNA after editing. Neuro-2a cells were harvested seven (7) days post electroporation, RNA was extracted and reverse transcribed. The relative amount of SARM1 RNA was quantified using AriaMx system. The level of the mRNA is quantified relative to untreated cells that were not edited.

[0025] FIG. 4: Editing activity of OMNI-103 CRISPR nuclease with an RNA guide molecule targeting SARM1 in HeLa cells. Specific RNA guide molecules were-co-transfected with OMNI-103 CRISPR nuclease to determine their on-target activity. Cells were harvested 72 hours post DNA transfection, genomic DNA was extracted, and the region of the mutation was amplified and analyzed by NGS. Transfection efficiency was measured by mCherry fluorescence. The graph represents the % of editing ± STDV of three (3) independent transfections.

### DETAILED DESCRIPTION

[0026] Unless otherwise defined, all technical and/or scientific terms used herein have the same meaning as commonly understood by one of ordinary skill in the art to which the invention pertains. Although methods and materials similar or equivalent to those described herein can be used in the practice or testing of embodiments of the invention, exemplary methods and/or materials are described below. In case of conflict, the patent specification, including definitions, will control. In addition, the materials, methods, and examples are illustrative only and are not intended to be necessarily limiting.

[0027] It should be understood that the terms “a” and “an” as used above and elsewhere herein refer to “one or more” of the enumerated components. It will be clear to one of ordinary skill in the art that the use of the singular includes the plural unless specifically stated otherwise. Therefore, the terms “a,” “an” and “at least one” are used interchangeably in this application.

[0028] For purposes of better understanding the present teachings and in no way limiting the scope of the teachings, unless otherwise indicated, all numbers expressing quantities, percentages or proportions, and other numerical values used in the specification and claims, are to be understood as being modified in all instances by the term “about.” Accordingly, unless indicated to the contrary, the numerical parameters set forth in the following specification and attached claims are approximations that may vary depending upon the desired properties sought to be obtained. At the very least, each numerical parameter should at least be construed in light of the number of reported significant digits and by applying ordinary rounding techniques.

[0029] Unless otherwise stated, adjectives such as “substantially” and “about” modifying a condition or relationship characteristic of a feature or features of an embodiment of the invention, are understood to mean that the condition or characteristic is defined to within tolerances that are acceptable for operation of the embodiment for an application for which it is intended. Unless otherwise indicated, the word “or” in the specification and claims is considered to be the inclusive “or” rather than the exclusive or, and indicates at least one of, or any combination of items it conjoins.

[0030] In the description and claims of the present application, each of the verbs, “comprise,” “include” and “have” and conjugates thereof, are used to indicate that the object or objects of the verb are not necessarily a complete listing of components, elements or parts of the subject or subjects of the verb. Other terms as used herein are meant to be defined by their well-known meanings in the art.

[0031] In some embodiments of the present invention, a DNA nuclease is utilized to affect a DNA break at a target site to induce cellular repair mechanisms, for example, but not limited to, non-homologous end-joining (NHEJ). During classical NHEJ, two ends of a double-strand break (DSB) site are ligated together in a fast but also inaccurate manner (i.e. frequently resulting in mutation of the DNA at the cleavage site in the form of small insertion or deletions).

[0032] As used herein, the term “modified cells” refers to cells in which a double strand break is affected by a complex of an RNA molecule and the CRISPR nuclease as a result of hybridization with the target sequence, i.e. on-target hybridization.

[0033] As used herein, the term “targeting sequence” or “targeting molecule” refers a nucleotide sequence or molecule comprising a nucleotide sequence that is capable of hybridizing to a specific target sequence, e.g., the targeting sequence has a nucleotide sequence which is at least partially complementary to the sequence being targeted along the length of the targeting sequence. The targeting sequence or targeting molecule may be part of an RNA molecule that can form a complex with a CRISPR nuclease, either alone or in combination with other RNA molecules, with the targeting sequence serving as the targeting portion of the CRISPR complex. When the molecule having the targeting sequence is present contemporaneously with the CRISPR molecule, the RNA molecule, alone or in combination with an additional one or more RNA molecules (e.g. a tracrRNA molecule), is capable of targeting the CRISPR nuclease to the specific target sequence. As non-limiting example, a guide sequence portion of a CRISPR RNA molecule or single-guide RNA molecule may serve as a targeting molecule. Each possibility represents a separate embodiment. A targeting sequence can be custom designed to target any desired sequence.

[0034] The term “targets” as used herein, refers to preferentially hybridizing a targeting sequence of a targeting molecule to a nucleic acid having a targeted nucleotide sequence. It is understood that the term “targets” encompasses variable hybridization efficiencies, such that there is preferential targeting of the nucleic acid having the targeted nucleotide sequence, but unintentional off-target hybridization in addition to on-target hybridization might also occur. It is understood that where an RNA molecule targets a sequence, a complex of the RNA molecule and a CRISPR nuclease molecule targets the sequence for nuclease activity.

[0035] The “guide sequence portion” of an RNA molecule refers to a nucleotide sequence that is capable of hybridizing to a specific target DNA sequence, e.g., the guide sequence portion has a nucleotide sequence which is partially or fully complementary to the DNA sequence being targeted along the length of the guide sequence portion. In some embodiments, the guide sequence portion is 17, 18, 19, 20, 21, 22, 23, 24, 25, 26, 27, 28, 29, 30, 31, 32, 33, 34, 35, 36, 37, 38, 39, 40, 41, 42, 43, 44, 45, 46, 47, 48, 49 or 50 nucleotides in length, or approximately 17-50, 17-49, 17-48, 17-47, 17-46, 17-45, 17-44, 17-43, 17-42, 17-41, 17-40, 17-39, 17-38, 17-37, 17-36, 17-35, 17-34, 17-33, 17-31, 17-30, 17-29, 17-28, 17-27, 17-26, 17-25, 17-24, 17-22, 17-21, 18-25, 18-24, 18-23, 18-22, 18-21, 19-25, 19-24, 19-23, 19-22, 19-21, 19-20, 20-22, 18-20, 20-21, 21-22, or 17-20 nucleotides in length. The entire length of the guide sequence portion is fully complementary to the DNA sequence being targeted along the length of the guide sequence portion. The guide sequence portion may be part of an RNA molecule that can form a complex with a CRISPR nuclease with the guide sequence portion serving as the DNA targeting portion of the CRISPR complex. When the RNA molecule having the guide sequence portion is present contemporaneously with the CRISPR molecule, alone or in combination with an additional one or more RNA molecules (e.g. a tracrRNA molecule), the RNA molecule is capable of targeting the CRISPR nuclease to the specific target DNA sequence. Accordingly, a CRISPR complex can be formed by direct binding of the RNA molecule having the guide sequence portion to a CRISPR nuclease or by binding of the RNA molecule having the guide sequence portion and an additional one or more RNA molecules to the CRISPR nuclease. Each possibility represents a separate embodiment. A guide sequence portion can be custom designed to target any desired sequence. Accordingly, a molecule comprising a “guide sequence portion” is a type of targeting molecule. In some embodiments, the guide sequence portion comprises a sequence that is the same as, or differs by no more than 1, 2, 3, 4, or 5 nucleotides from, a guide sequence portion described herein, e.g., a guide sequence set forth in any of SEQ ID NOs:1-12105. Each possibility represents a separate embodiment. In some of these embodiments, the guide sequence portion comprises a sequence that is the same as a sequence set forth in any of SEQ ID NOs:1-12105. Throughout this application, the terms “guide molecule,” “RNA guide molecule,” “guide RNA molecule,” and “gRNA molecule” are synonymous with a molecule comprising a guide sequence portion.

[0036] The term “non-discriminatory” as used herein refers to a guide sequence portion of an RNA molecule that targets a specific DNA sequence that is common to all alleles of a gene.

[0037] In embodiments of the present invention, an RNA molecule comprises a guide sequence portion having 17-50 contiguous nucleotides containing nucleotides in the sequence set forth in any one of SEQ ID NOs: 1-12105.

[0038] The RNA molecule and or the guide sequence portion of the RNA molecule may contain modified nucleotides. Exemplary modifications to nucleotides / polynucleotides may be synthetic and encompass polynucleotides which contain nucleotides comprising bases other than the naturally occurring adenine, cytosine, thymine, uracil, or guanine bases. Modifications to polynucleotides include polynucleotides which contain synthetic, non-naturally occurring nucleosides e.g., locked nucleic acids. Modifications to polynucleotides may be utilized to increase or decrease stability of an RNA. An example of a modified polynucleotide is an mRNA containing 1-methyl pseudo-uridine. For examples of modified polynucleotides and their uses, see U.S. Pat. 8,278,036, PCT International Publication No. WO/2015/006747, and Weissman and Kariko (2015), each of which is hereby incorporated by reference.

[0039] As used herein, “contiguous nucleotides” set forth in a SEQ ID NO refers to nucleotides in a sequence of nucleotides in the order set forth in the SEQ ID NO without any intervening nucleotides.

[0040] In embodiments of the present invention, the guide sequence portion may be 50 nucleotides in length and contain 20-22 contiguous nucleotides in the sequence set forth in any one of SEQ ID NOs: 1-12105. In embodiments of the present invention, the guide sequence portion may be less than 22 nucleotides in length. For example, in embodiments of the present invention the guide sequence portion may be 17, 18, 19, 20, or 21 nucleotides in length. In such embodiments the guide sequence portion may consist of 17, 18, 19, 20, or 21 nucleotides, respectively, in the sequence of 17-22 contiguous nucleotides set forth in any one of SEQ ID NOs: 1-12105. For example, a guide sequence portion having 17 nucleotides in the sequence of 17 contiguous nucleotides set forth in SEQ ID NO: 12106 may consist of any one of the following nucleotide sequences (nucleotides excluded from the contiguous sequence are marked in strike-through):

AAAAAAAUGUACUUGGUUCC (SEQ ID NO: 12106)

17 nucleotide guide sequence 1: AAAAUGUACUUGGUUCC
(SEQ ID NO: 12107)

17 nucleotide guide sequence 2: AAAUGUACUUGGUU(S
EQ ID NO: 12108)

17 nucleotide guide sequence 3: AAAAAAUGUACUUGGU
U(SEQ ID NO: 12109)

17 nucleotide guide sequence 4: AAAAAAAUGUACUUGG
U(SEQ ID NO: 12110)

[0041] In embodiments of the present invention, the guide sequence portion may be greater than 20 nucleotides in length. For example, in embodiments of the present invention the guide sequence portion may be 21, 22, 23, 24 or 25 nucleotides in length. In such embodiments the guide sequence portion comprises 17-50 nucleotides containing the sequence of 20, 21 or 22 contiguous nucleotides set forth in any one of SEQ ID NOs: 1-12105 and additional nucleotides fully complimentary to a nucleotide or sequence of nucleotides adjacent to the 3′ end of the target sequence, 5′ end of the target sequence, or both.

[0042] In embodiments of the present invention a CRISPR nuclease and an RNA molecule comprising a guide sequence portion form a CRISPR complex that binds to a target DNA sequence to effect cleavage of the target DNA sequence. CRISPR nucleases, e.g. Cpfl, may form a CRISPR complex comprising a CRISPR nuclease and RNA molecule without a further tracrRNA molecule. Alternatively, CRISPR nucleases, e.g. Cas9, may form a CRISPR complex between the CRISPR nuclease, an RNA molecule, and a tracrRNA molecule. A guide sequence portion, which comprises a nucleotide sequence that is capable of hybridizing to a specific target DNA sequence, and a sequence portion that participates in CRIPSR nuclease binding, e.g. a tracrRNA sequence portion, can be located on the same RNA molecule. Alternatively, a guide sequence portion may be located on one RNA molecule and a sequence portion that participates in CRIPSR nuclease binding, e.g. a tracrRNA portion, may located on a separate RNA molecule. A single RNA molecule comprising a guide sequence portion (e.g. a DNA-targeting RNA sequence) and at least one CRISPR protein-binding RNA sequence portion (e.g. a tracrRNA sequence portion), can form a complex with a CRISPR nuclease and serve as the DNA-targeting molecule. In some embodiments, a first RNA molecule comprising a DNA-targeting RNA portion, which includes a guide sequence portion, and a second RNA molecule comprising a CRISPR protein-binding RNA sequence interact by base pairing to form an RNA complex that targets the CRISPR nuclease to a DNA target site or, alternatively, are fused together to form an RNA molecule that complexes with the CRISPR nuclease and targets the CRISPR nuclease to a DNA target site.

[0043] In embodiments of the present invention, an RNA molecule comprising a guide sequence portion may further comprise the sequence of a tracrRNA molecule. Such embodiments may be designed as a synthetic fusion of the guide portion of the RNA molecule and the trans-activating crRNA (tracrRNA). (See Jinek et al., 2012). In such an embodiment, the RNA molecule is a single-guide RNA (sgRNA) molecule. Embodiments of the present invention may also form CRISPR complexes utilizing a separate tracrRNA molecule and a separate RNA molecule comprising a guide sequence portion. In such embodiments the tracrRNA molecule may hybridize with the RNA molecule via basepairing and may be advantageous in certain applications of the invention described herein.

[0044] The term “tracr mate sequence” refers to a sequence sufficiently complementary to a tracrRNA molecule so as to hybridize to the tracrRNA via basepairing and promote the formation of a CRISPR complex. (See U.S. Pat. No. 8,906,616). In embodiments of the present invention, the RNA molecule may further comprise a portion having a tracr mate sequence.

[0045] A “gene,” for the purposes of the present disclosure, includes a DNA region encoding a gene product, as well as all DNA regions which regulate the production of the gene product, whether or not such regulatory sequences are adjacent to coding and/or transcribed sequences. Accordingly, a gene includes, but is not necessarily limited to, promoter sequences, terminators, translational regulatory sequences such as ribosome binding sites and internal ribosome entry sites, enhancers, silencers, insulators, boundary elements, replication origins, matrix attachment sites and locus control regions.

[0046] “Eukaryotic” cells include, but are not limited to, fungal cells (such as yeast), plant cells, animal cells, mammalian cells and human cells.

[0047] The term “nuclease” as used herein refers to an enzyme capable of cleaving the phosphodiester bonds between the nucleotide subunits of nucleic acid. A nuclease may be isolated or derived from a natural source. The natural source may be any living organism. Alternatively, a nuclease may be a modified or a synthetic protein which retains the phosphodiester bond cleaving activity. Gene modification can be achieved using a nuclease, for example a CRISPR nuclease.

[0048] According to embodiments of the present invention, there is provided an RNA molecule comprising a guide sequence portion (e.g. a targeting sequence) comprising a nucleotide sequence that is fully or partially complementary to a target sequence comprising a SNP position (REF/SNP sequence) located in or near an allele of the SARM1 gene. In some embodiments, the guide sequence portion of the RNA molecule consists of 16, 17, 18, 19, 20, 21, 22, 23, 24, 25, 26, or more than 26 nucleotides. In some embodiments the guide sequence portion is configured to target a CRISPR nuclease to a target sequence and provide a cleavage event, by a CRISPR nuclease complexed therewith, selected from a double-strand break and a single-strand break within 500, 400, 300, 200, 100, 50, 25, or 10 nucleotides of a SARM1 target site. In some embodiments, the cleavage event enables non-sense mediated decay of the SARM1 gene. In some embodiments, the RNA molecule is a guide RNA molecule such as a crRNA molecule or a single-guide RNA molecule.

[0049] In some embodiments, the target sequence of an allele of SARM1 gene is altered (e.g., by introduction of an NHEJ-mediated indel (e.g., insertion or deletion), and results in reduction or elimination of expression of the gene product encoded by the allele of SARM1 gene. In some embodiments, the reduction or elimination of expression is due to non-sense mediated mRNA decay such as due to immature stop codon. In some embodiments, the reduction or elimination of expression is due to expression of a truncated form of the SARM1 gene product. In some embodiments, the guide sequence portion is complementary to a target sequence comprising a SNP position. In some embodiments, the SNP position is rs782593684. In some embodiments, the guide sequence portion comprises a sequence that is the same as or differs by no more than 1, 2, or 3 nucleotides from a sequence set forth in any of SEQ ID NOs: 1-103. In some embodiments, the guide sequence portion comprises a sequence that is the same as or differs by no more than 1, 2, or 3 nucleotides from a sequence set forth in any of SEQ ID NOs: 3, 19-21, 26, 30, 32, 34, 37, 104-131, 40, 54, 60-61, 65-67, 132-155, 69, 72, 76, 88, 94, 98, 100-102, or 156-181. Each possibility represents a separate embodiment. In some embodiments, the SNP position 17:28372349_C_CT. In some embodiments, the guide sequence portion comprises a sequence that is the same as or differs by no more than 1, 2, or 3 nucleotides from a sequence set forth in any of SEQ ID NOs: 182-313. In some embodiments, the guide sequence portion comprises a sequence that is the same as or differs by no more than 1, 2, or 3 nucleotides from a sequence set forth in any of SEQ ID NOs: 196, 203, 209, 211, 217, 219-221, 226, 228-229, 314-352, 246-247, 253-254, 259-262, 264, 266-267, 353-389, 271, 281, 287-288, 302-305, 310, 312-313, or 390-432. Each possibility represents a separate embodiment.

[0050] According to embodiments of the present invention, there is provided an RNA molecule comprising a guide sequence portion (e.g. a targeting sequence) comprising a nucleotide sequence that is fully or partially complementary to a target sequence located in or near the SARM1 gene. In some embodiments, the guide sequence portion is complementary to a target sequence located from 30 base pairs upstream to 30 base pairs downstream of Exon I, Exon II, Exon III, Exon IV, Exon V, Exon VI, Exon VII, Exon VIII, or Exon IX of the SARM1 gene. In some embodiments, the guide sequence portion is complementary to a target sequence located from 50 base pairs upstream to 50 base pairs downstream of Exon I, Exon II, Exon III, Exon IV, Exon V, Exon VI, Exon VII, Exon VIII, or Exon IX of the SARM1 gene. Each possibility represents a separate embodiment. In some embodiments, the target sequence of SARM1 gene is altered (e.g., by introduction of an NHEJ-mediated indel (e.g., insertion or deletion), and results in reduction or elimination of expression of the gene product encoded by the SARM1 gene. In some embodiments, the reduction or elimination of expression is due to non-sense mediated mRNA decay. In some embodiments, the guide sequence portion of the RNA molecule consists of 16, 17, 18, 19, 20, 21, 22, 23, 24, 25, 26, or more than 26 nucleotides. In some embodiments the guide sequence portion is configured to target a CRISPR nuclease to a target sequence and provide a cleavage event, by a CRISPR nuclease complexed therewith, selected from a double-strand break and a single-strand break within 500, 400, 300, 200, 100, 50, 25, or 10 nucleotides of a SARM1 target site. In some embodiments, the cleavage event enables non-sense mediated decay of the SARM1 gene. In some embodiments, the RNA molecule is a guide RNA molecule such as a crRNA molecule or a single-guide RNA molecule.

[0051] In some embodiments, the guide sequence portion is complementary to a target sequence located from 30 base pairs upstream to 30 base pairs downstream of an Exon of the SARM1 gene. In some embodiments, the guide sequence portion is complementary to a target sequence located from 50 base pairs upstream to 50 base pairs downstream of an Exon of the SARM1 gene. In some embodiments, the guide sequence portion is complementary to a target sequence located from 7 base pairs upstream to 7 base pairs downstream of an Exon of the SARM1 gene. In some embodiments, the Exon is Exon I and the guide sequence portion comprises a sequence that is the same as or differs by no more than 3 nucleotides from a sequence set forth in any of SEQ ID NOs: 1-30, 32, 34, 36-37, 182-229, 1099-1838, 38-67, 230-238, 240-251, 253-257, 259-267, 1839-2531, 69-102, 268-293, 295-300, 302-313, or 2532-3227. In some embodiments, the Exon is Exon II, and the guide sequence portion comprises a sequence that is the same as or differs by no more than 3 nucleotides from a sequence set forth in any of SEQ ID NOs: 3228-6803. In some embodiments, the Exon is Exon III, and the guide sequence portion comprises a sequence that is the same as or differs by no more than 3 nucleotides from a sequence set forth in any of SEQ ID NOs: 6804-8007. In some embodiments, the Exon is Exon IV, and the guide sequence portion comprises a sequence that is the same as or differs by no more than 3 nucleotides from a sequence set forth in any of SEQ ID NOs: 8008-8487. In some embodiments, the Exon is Exon V, and the guide sequence portion comprises a sequence that is the same as or differs by no more than 3 nucleotides from a sequence set forth in any of SEQ ID NOs: 8488-9831. In some embodiments, the Exon is Exon VI, and the guide sequence portion comprises a sequence that is the same as or differs by no more than 3 nucleotides from a sequence set forth in any of SEQ ID NOs: 9832-10377. In some embodiments, the Exon is Exon VII, and the guide sequence portion comprises a sequence that is the same as or differs by no more than 3 nucleotides from a sequence set forth in any of SEQ ID NOs: 10378-11445. In some embodiments, the Exon is Exon VIII, and the guide sequence portion comprises a sequence that is the same as or differs by no more than 3 nucleotides from a sequence set forth in any of SEQ ID NOs: 11446-12105. In some embodiments, the Exon is Exon IX, and the guide sequence portion comprises a sequence that is the same as or differs by no more than 3 nucleotides from a sequence set forth in any of SEQ ID NOs: 433-1098.

[0052] According to embodiments of the present invention, there is provided a method for inactivating alleles of the sterile alpha and TIR motif-containing 1 (SARM1) gene in a cell, the method comprising
[0053] introducing to the cell a composition comprising:
   [0054] at least one CRISPR nuclease or a sequence encoding a CRISPR nuclease; and
   [0055] an RNA molecule comprising a guide sequence,
[0056] wherein a complex of the CRISPR nuclease and the RNA molecule affects a double strand break in the alleles of the SARM1 gene,
[0057] wherein the guide sequence portion of the RNA molecule comprises 17-50 contiguous nucleotides containing nucleotides in the sequence set forth in any one of SEQ ID NOs: 1-12105.

[0058] In some embodiments, the composition is introduced to a cell in a subject or to a cell in culture.

[0059] In some embodiments, the cell is a photoreceptor cell, preferably a rod cell or a cone cell.

[0060] In some embodiments, the CRISPR nuclease and the RNA molecule are introduced to the cell at substantially the same time or at different times.

[0061] In some embodiments, alleles of the SARM1 gene in the cell are subjected to an insertion or deletion mutation.

[0062] In some embodiments, the insertion or deletion mutation creates an early stop codon.

[0063] In some embodiments, the inactivating results in a truncated protein encoded by the mutated allele.

[0064] According to embodiments of the present invention, there is provided use of any one of the compositions described herein for treating, ameliorating, or preventing retinitis pigmentosa, photoreceptor degeneration, or age-related macular degeneration, comprising delivering the composition to a subject experiencing or at risk of experiencing retinitis pigmentosa, photoreceptor degeneration, or age-related macular degeneration.

[0065] According to embodiments of the present invention, there is provided a medicament comprising any one of the compositions described herein for treating, ameliorating, or preventing retinitis pigmentosa, photoreceptor degeneration, or age-related macular degeneration, such that the medicament is administered by delivering the composition to a subject experiencing or at risk of experiencing retinitis pigmentosa, photoreceptor degeneration, or age-related macular degeneration.

[0066] According to embodiments of the present invention, there is provided a kit for inactivating a SARM1 allele in a cell, comprising any one of the compositions described herein and instructions for delivering the composition to the cell.

[0067] According to embodiments of the present invention, there is provided a kit for treating or preventing retinitis pigmentosa, photoreceptor degeneration, or age-related macular degeneration in a subject, comprising any one of the compositions described herein and instructions for delivering the composition to a subject experiencing or at risk of experiencing retinitis pigmentosa, photoreceptor degeneration, or age-related macular degeneration

[0068] According to embodiments of the present invention, there is provided a composition comprising an RNA molecule which comprises 17-50 contiguous nucleotides containing nucleotides in the sequence set forth in any one of SEQ ID NOs: 1-12105.

[0069] In some embodiments, the composition further comprises a CRISPR nuclease.

[0070] In some embodiments, the composition further comprises a tracrRNA molecule.

[0071] According to embodiments of the present invention, there is provided a gene editing composition comprising an RNA molecule comprising a guide sequence portion having 17-50 contiguous nucleotides containing nucleotides in the sequence set forth in any one of SEQ ID NOs: 1-12105. In some embodiments, the RNA molecule further comprises a portion having a sequence which binds to a CRISPR nuclease. In some embodiments, the sequence which binds to a CRISPR nuclease is a tracrRNA sequence.

[0072] In some embodiments, the RNA molecule further comprises a portion having a tracr mate sequence.

[0073] In some embodiments, the RNA molecule may further comprise one or more linker portions.

[0074] According to embodiments of the present invention, an RNA molecule may be up to 1000, 900, 800, 700, 600, 500, 450, 400, 350, 300, 290, 280, 270, 260, 250, 240, 230, 220, 210, 200, 190, 180, 170, 160, 150, 140, 130, 120, 110, or 100 nucleotides in length. Each possibility represents a separate embodiment. In embodiments of the present invention, the RNA molecule may be 17 up to 300 nucleotides in length, 100 up to 300 nucleotides in length, 150 up to 300 nucleotides in length, 100 up to 500 nucleotides in length, 100 up to 400 nucleotides in length, 200 up to 300 nucleotides in length, 100 to 200 nucleotides in length, or 150 up to 250 nucleotides in length. Each possibility represents a separate embodiment.

[0075] According to some embodiments of the present invention, the composition further comprises a tracrRNA molecule.

[0076] According to some embodiments of the present invention, there is provided a method for inactivating SARM1 expression in a cell, the method comprising delivering to the cell a composition comprising an RNA molecule comprising a guide sequence portion having 17-50 contiguous nucleotides containing nucleotides in the sequence set forth in any one of SEQ ID NOs: 1-12105 and a CRISPR nuclease.

[0077] According to some embodiments of the present invention, there is provided a method for preventing retinitis pigmentosa, photoreceptor degeneration, or age-related macular degeneration, the method comprising delivering to a cell of a subject a composition comprising an RNA molecule comprising a guide sequence portion having 17-50 contiguous nucleotides containing nucleotides in the sequence set forth in any one of SEQ ID NOs: 1-12105 and a CRISPR nuclease.

[0078] According to embodiments of the present invention, at least one CRISPR nuclease and the RNA molecule or RNA molecules are delivered to the subject and/or cells substantially at the same time or at different times.

[0079] In some embodiments, a tracrRNA molecule is delivered to the subject and/or cells substantially at the same time or at different times as the CRISPR nuclease and RNA molecule or RNA molecules.

[0080] The compositions and methods of the present disclosure may be utilized for treating, preventing, ameliorating, or slowing progression of retinitis pigmentosa, photoreceptor degeneration, or age-related macular degeneration.

[0081] Any one of, or combination of, the above-mentioned strategies for deactivating SARM1 expression may be used in the context of the invention.

[0082] In embodiments of the present invention, an RNA molecule is used to direct a CRISPR nuclease to an exon or a splice site of a SARM1 allele in order to create a double-stranded break (DSB), leading to insertion or deletion of nucleotides by inducing an error-prone non-homologous end-joining (NHEJ) mechanism and formation of a frameshift mutation in the SARM1 allele. The frameshift mutation may result in, for example, inactivation or knockout of the SARM1 allele by generation of an early stop codon in the SARM1 allele and to generation of a truncated protein or to nonsense-mediated mRNA decay of the transcript of the allele. In further embodiments, one RNA molecule is used to direct a CRISPR nuclease to a promotor of a SARM1 allele.

[0083] In some embodiments, the method is utilized for treating a subject at risk for retinitis pigmentosa, photoreceptor degeneration, or age-related macular degeneration, which are disease phenotypes resulting from expression of the SARM1 gene. In such embodiments, the method results in improvement, amelioration, or prevention of the disease phenotype.

[0084] Embodiments of compositions described herein include at least one CRISPR nuclease, RNA molecule(s), and a tracrRNA molecule, being effective in a subject or cells at the same time. The at least one CRISPR nuclease, RNA molecule(s), and tracrRNA may be delivered substantially at the same time or can be delivered at different times but have effect at the same time. For example, this includes delivering the CRISPR nuclease to the subject or cells before the RNA molecule and/or tracrRNA is substantially extant in the subject or cells.

[0085] In some embodiments, the cell is a rod cell. In some embodiments, the cell is a cone cell. In some embodiments, the cell is a photoreceptor cell.

### SARM1 Editing Strategies

[0086] There are many healthy individuals with a biallelic knockout of SARM1 in their genome. Accordingly, the present invention provides methods to knockout SARM1 alleles in cells of a subject, preferably photoreceptor cells, thereby inhibiting photoreceptor degeneration without causing harm to the subject. The provided methods to knockout SARM1 alleles in a cell may be used to treat, prevent, or ameliorate any one of retinitis pigmentosa, photoreceptor degeneration, and age-related macular degeneration.

[0087] SARM1 editing strategies include, but are not limited to: (1) Biallelic knockout by targeting any one of, or a combination of, Exons 2-9, including within seven nucleotides upstream and downstream of the exons to flank splice donor and acceptor sites, as frameshifts in these exons lead to non-functional, truncated SARM1 proteins or non-sense mediated decay of the mutated SARM1 transcripts; and (2) Truncation of SARM1 protein by mediating indels in Exon 1 upstream to or overlapping the second methionine codon in the exon that would eliminate it and thus prevent re-initiation of translation, or by disrupting a splice donor by targeting Exon 1-Intron 1 junction.

### CRISPR Nucleases and PAM Recognition

[0088] In some embodiments, the sequence specific nuclease is selected from CRISPR nucleases, or is a functional variant thereof. In some embodiments, the sequence specific nuclease is an RNA-guided DNA nuclease. In such embodiments, the RNA sequence which guides the RNA-guided DNA nuclease (e.g., Cpfl) binds to and/or directs the RNA-guided DNA nuclease to all SARM1 alleles in a cell. In some embodiments, the CRISPR complex does not further comprise a tracrRNA. In a non-limiting example, in which the RNA-guided DNA nuclease is a CRISPR protein, the at least one nucleotide which differs between the dominant SARM1 allele and the functional allele may be within the PAM site and/or proximal to the PAM site within the region that the RNA molecule is designed to hybridize to. A skilled artisan will appreciate that RNA molecules can be engineered to bind to a target of choice in a genome by commonly known methods in the art.

[0089] The term “PAM” as used herein refers to a nucleotide sequence of a target DNA located in proximity to the targeted DNA sequence and recognized by the CRISPR nuclease complex. The PAM sequence may differ depending on the nuclease identity. In addition, there are CRISPR nucleases that can target almost all PAMs. In some embodiments of the present invention, a CRISPR system utilizes one or more RNA molecules having a guide sequence portion to direct a CRISPR nuclease to a target DNA site via Watson-Crick base-pairing between the guide sequence portion and the protospacer on the target DNA site, which is next to the protospacer adjacent motif (PAM), which is an additional requirement for target recognition. The CRISPR nuclease then mediates cleavage of the target DNA site to create a double-stranded break within the protospacer. In a non-limiting example, a type II CRISPR system utilizes a mature crRNA:tracrRNA complex that directs the CRISPR nuclease, e.g. Cas9 to the target DNA the target DNA via Watson-Crick base-pairing between the guide sequence portion of the crRNA and the protospacer on the target DNA next to the protospacer adjacent motif (PAM). A skilled artisan will appreciate that each of the engineered RNA molecule of the present invention is further designed such as to associate with a target genomic DNA sequence of interest next to a protospacer adjacent motif (PAM), e.g., a PAM matching the sequence relevant for the type of CRISPR nuclease utilized, such as for a non-limiting example, NGG or NAG, wherein “N” is any nucleobase, for Streptococcus pyogenes Cas9 WT (SpCAS9); NNGRRT for Staphylococcus aureus (SaCas9); NNNVRYM for Jejuni Cas9 WT; NGAN or NGNG for SpCas9-VQR variant; NGCG for SpCas9-VRER variant; NGAG for SpCas9-EQR variant; NRRH for SpCas9-NRRH variant, wherein N is any nucleobase, R is A or G and H is A, C, or T; NRTH for SpCas9-NRTH variant, wherein N is any nucleobase, R is A or G and H is A, C, or T; NRCH for SpCas9-NRCH variant, wherein N is any nucleobase, R is A or G and H is A, C, or T; NG for SpG variant of SpCas9 wherein N is any nucleobase; NG or NA for SpCas9-NG variant of SpCas9 wherein N is any nucleobase; NR or NRN or NYN for SpRY variant of SpCas9, wherein N is any nucleobase, R is A or G and Y is C or T; NNG for Streptococcus canis Cas9 variant (ScCas9), wherein N is any nucleobase; NNNRRT for SaKKH-Cas9 variant of Staphylococcus aureus (SaCas9), wherein N is any nucleobase, and R is A or G; NNNNGATT for Neisseria meningitidis (NmCas9), wherein N is any nucleobase; TTN for Alicyclobacillus acidiphilus Cas12b (AacCas12b), wherein N is any nucleobase; or TTTV for Cpfl, wherein V is A, C or G. RNA molecules of the present invention are each designed to form complexes in conjunction with one or more different CRISPR nucleases and designed to target polynucleotide sequences of interest utilizing one or more different PAM sequences respective to the CRISPR nuclease utilized.

[0090] In some embodiments, an RNA-guided DNA nuclease e.g., a CRISPR nuclease, may be used to cause a DNA break, either double or single-stranded in nature, at a desired location in the genome of a cell. The most commonly used RNA-guided DNA nucleases are derived from CRISPR systems, however, other RNA-guided DNA nucleases are also contemplated for use in the genome editing compositions and methods described herein. For instance, see U.S. Publication No. 2015/0211023, incorporated herein by reference.

[0091] CRISPR systems that may be used in the practice of the invention vary greatly. CRISPR systems can be a type I, a type II, or a type III system. Non- limiting examples of suitable CRISPR proteins include Cas3, Cas4, Cas5, Cas5e (or CasD), Cas6, Cas6e, Cas6f, Cas7, Cas8al, Cas8a2, Cas8b, Cas8c, Cas9, Cas10, Cas1 Od, CasF, CasG, CasH, Csyl, Csy2, Csy3, Cse1 (or CasA), Cse2 (or CasB), Cse3 (or CasE), Cse4 (or CasC), Cscl, Csc2, Csa5, Csn2, Csm2, Csm3, Csm4, Csm5, Csm6, Cmr1, Cmr3, Cmr4, Cmr5, Cmr6, Csbl, Csb2, Csb3,Csx17, Csxl4, Csx10, Csx16, CsaX, Csx3, Cszl, Csxl5, Csf1, Csf2, Csf3, Csf4, and Cul966.

[0092] In some embodiments, the RNA-guided DNA nuclease is a CRISPR nuclease derived from a type II CRISPR system (e.g., Cas9). The CRISPR nuclease may be derived from Streptococcus pyogenes, Streptococcus thermophilus, Streptococcus sp., Staphylococcus aureus, Neisseria meningitidis, Treponema denticola, Nocardiopsis dassonvillei, Streptomyces pristinaespiralis, Streptomyces viridochromogenes, Streptomyces viridochromogenes, Streptosporangium roseum, Streptosporangium roseum, Alicyclobacillus acidocaldarius, Bacillus pseudomycoides, Bacillus selenitireducens, Exiguobacterium sibiricum, Lactobacillus delbrueckii, Lactobacillus salivarius, Microscilla marina, Burkholderiales bacterium, Polaromonas naphthalenivorans, Polaromonas sp., Crocosphaera watsonii, Cyanothece sp., Microcystis aeruginosa, Synechococcus sp., Acetohalobium arabaticum, Ammonifex degensii, Caldicelulosiruptor becscii, Candidatus Desulforudis, Clostridium botulinum, Clostridium difficile, Finegoldia magna, Natranaerobius thermophilus, Pelotomaculumthermopropionicum, Acidithiobacillus caldus, Acidithiobacillus ferrooxidans, Allochromatium vinosum, Marinobacter sp., Nitrosococcus halophilus, Nitrosococcus watsoni, Pseudoalteromonas haloplanktis, Ktedonobacter racemifer, Methanohalobium evestigatum, Anabaena variabilis, Nodularia spumigena, Nostoc sp., Arthrospira maxima, Arthrospira platensis, Arthrospira sp., Lyngbya sp., Microcoleus chthonoplastes, Oscillatoria sp., Petrotoga mobilis, Thermosipho africanus, Acaryochloris marina, or any species which encodes a CRISPR nuclease with a known PAM sequence. CRISPR nucleases encoded by uncultured bacteria may also be used in the context of the invention. (See Burstein et al. Nature, 2017). Variants of CRIPSR proteins having known PAM sequences e.g., SpCas9 D1135E variant, SpCas9 VQR variant, SpCas9 EQR variant, or SpCas9 VRER variant may also be used in the context of the invention.

[0093] Thus, an RNA-guided DNA nuclease of a CRISPR system, such as a Cas9 protein or modified Cas9 or homolog or ortholog of Cas9, or other RNA-guided DNA nucleases belonging to other types of CRISPR systems, such as Cpfl and its homologs and orthologs, may be used in the compositions of the present invention. Additional CRISPR nucleases may also be used, for example, the nucleases described in PCT International Application Publication Nos. WO2020/223514 and WO2020/223553, each of which are hereby incorporated by reference.

[0094] In certain embodiments, the CRIPSR nuclease may be a “functional derivative” of a naturally occurring Cas protein. A “functional derivative” of a native sequence polypeptide is a compound having a qualitative biological property in common with a native sequence polypeptide. “Functional derivatives” include, but are not limited to, fragments of a native sequence and derivatives of a native sequence polypeptide and its fragments, provided that they have a biological activity in common with a corresponding native sequence polypeptide. A biological activity contemplated herein is the ability of the functional derivative to hydrolyze a DNA substrate into fragments. The term “derivative” encompasses both amino acid sequence variants of polypeptide, covalent modifications, and fusions thereof. Suitable derivatives of a Cas polypeptide or a fragment thereof include but are not limited to mutants, fusions, covalent modifications of Cas protein or a fragment thereof. Cas protein, which includes Cas protein or a fragment thereof, as well as derivatives of Cas protein or a fragment thereof, may be obtainable from a cell or synthesized chemically or by a combination of these two procedures. The cell may be a cell that naturally produces Cas protein, or a cell that naturally produces Cas protein and is genetically engineered to produce the endogenous Cas protein at a higher expression level or to produce a Cas protein from an exogenously introduced nucleic acid, which nucleic acid encodes a Cas that is same or different from the endogenous Cas. In some cases, the cell does not naturally produce Cas protein and is genetically engineered to produce a Cas protein.

[0095] In some embodiments, the CRISPR nuclease is Cpfl. Cpfl is a single RNA-guided endonuclease which utilizes a T-rich protospacer-adj acent motif. Cpf1 cleaves DNA via a staggered DNA double-stranded break. Two Cpfl enzymes from Acidaminococcus and Lachnospiraceae have been shown to carry out efficient genome-editing activity in human cells. (See Zetsche et al., 2015).

[0096] Thus, an RNA-guided DNA nuclease of a Type II CRISPR System, such as a Cas9 protein or modified Cas9 or homologs, orthologues, or variants of Cas9, or other RNA-guided DNA nucleases belonging to other types of CRISPR systems, such as Cpf1 and its homologs, orthologues, or variants, may be used in the present invention.

[0097] In some embodiments, the guide molecule comprises one or more chemical modifications which imparts a new or improved property (e.g., improved stability from degradation, improved hybridization energetics, or improved binding properties with an RNA-guided DNA nuclease). Suitable chemical modifications include, but are not limited to: modified bases, modified sugar moieties, or modified inter-nucleoside linkages. Non-limiting examples of suitable chemical modifications include: 4-acetyleytidine, 5-(carboxyhydroxymethyl)uridine, 2′-O-methyleytidine, 5-carboxymethylaminomethyl-2-thiouridine, 5-carboxymethylaminomethyluridine, dihydrouridine, 2′-O-methylpseudouridine, “beta, D-galactosylqueuosine”, 2′-O-methylguanosine, inosine, N6-isopentenyladenosine, 1-methyladenosine, 1-methylpseudouridine, 1-methylguanosine, 1-methylinosine, “2,2-dimethylguanosine”, 2-methyladenosine, 2-methylguanosine, 3-methyleytidine, 5-methyleytidine, N6-methyladenosine, 7-methylguanosine, 5-methylaminomethyluridine, 5-methoxyaminomethyl-2-thiouridine, “beta, D-mannosylqueuosine”, 5-methoxycarbonylmethyl-2-thiouridine, 5-methoxycarbonylmethyluridine, 5-methoxyuridine, 2-methylthio-N6-isopentenyladenosine, N-((9-beta-D-ribofuranosyl-2-methylthiopurine-6-yl)carbamoyl)threonine, N-((9-beta-D-ribofuranosylpurine-6-yl)N-methylcarbamoyl)threonine, uridine-5-oxyacetic acid-methylester, uridine-5-oxyacetic acid, wybutoxosine, queuosine, 2-thiocytidine, 5-methyl-2-thiouridine, 2-thiouridine, 4-thiouridine, 5-methyluridine, N-((9-beta-D-ribofuranosylpurine-6-yl)-carbamoyl)threonine, 2′-O-methyl-5-methyluridine, 2′-O-methyluridine, wybutosine, “3-(3-amino-3-carboxy-propyl)uridine, (acp3)u”, 2′-0-methyl (M), 3′-phosphorothioate (MS), 3′-thioPACE (MSP), pseudouridine, or 1-methyl pseudo-uridine. Each possibility represents a separate embodiment of the present invention.

[0098] In addition to targeting SARM1 alleles by a RNA-guided CRISPR nuclease, other means of inhibiting SARM1 expression in a target cell, preferably a photoreceptor cell, include but are not limited to use of a gapmer, shRNA, siRNA, a customized TALEN, meganuclease, or zinc finger nuclease, a small molecule inhibitor, and any other method known in the art for reducing or eliminating expression of a gene in a target cell. See, for example, U.S. Pat. Nos. 6,506,559; 7,560,438; 8,420,391; 8,552,171; 7,056,704; 7,078,196; 8,362,231; 8,372,968; 9,045,754; and PCT International Publication Nos. WO/2004/067736; WO/2006/097853; WO/2003/087341; WO/2000/0415661; WO/2003/080809; WO/2010/079430; WO/2010/079430; WO/2011/072246; WO/2018/057989; and WO/2017/164230, the entire contents of each of which are incorporated herein by reference.

[0099] Advantageously, guide RNA molecules comprising at least one guide sequence portion presented herein provide improved SARM1 knockout efficiency when complexed with a CRISPR nuclease in a cell relative to other guide RNA molecules. These specifically designed sequences may also be useful for identifying SARM1 target sites for other nucleotide targeting-based gene-editing or gene-silencing methods, for example, siRNA, TALENs, meganucleases or zinc-finger nucleases.

### Delivery to Cells

[0100] Any one of the compositions described herein may be delivered to a target cell by any suitable means. RNA molecule compositions of the present invention may be targeted to any cell which contains and/or expresses a SARM1 allele, such as a mammalian photoreceptor cell (e.g. a rod cell or a cone cell). For example, in one embodiment the RNA molecule specifically targets SARM1 alleles in a target cell and the target cell is a photoreceptor cell. In some embodiments, the target cell is a rod cell. In some embodiments, the target cell is a cone cell. The delivery to the cell may be performed in vivo, ex vivo, or in vitro. Further, the nucleic acid compositions described herein may be delivered to a cell as one or more of DNA molecules, RNA molecules, ribonucleoproteins (RNP), nucleic acid vectors, or any combination thereof.

[0101] In some embodiments, the RNA molecule comprises a chemical modification. Non-limiting examples of suitable chemical modifications include 2′-O-methyl (M), 2′-0-methyl, 3′phosphoroti-tioate (MS) or 2′-0-methyl, 3 ‘thioPACE (MSP), pseudouridine, and 1-methyl pseudo-uridine. Each possibility represents a separate embodiment of the present invention.

[0102] Any suitable viral vector system may be used to deliver nucleic acid compositions e.g., the RNA molecule compositions of the subject invention. Conventional viral and non-viral based gene transfer methods can be used to introduce nucleic acids and target tissues. In certain embodiments, nucleic acids are administered for in vivo or ex vivo gene therapy uses. Non-viral vector delivery systems include naked nucleic acid, and nucleic acid complexed with a delivery vehicle such as a liposome or poloxamer. For a review of gene therapy procedures, see Anderson (1992); Nabel & Felgner (1993); Mitani & Caskey (1993); Dillon (1993); Miller (1992); Van Brunt (1988); Vigne (1995); Kremer & Perricaudet (1995); Haddada et al. (1995); and Yu et al. (1994).

[0103] Methods of non-viral delivery of nucleic acids and/or proteins include electroporation, lipofection, microinjection, biolistics, particle gun acceleration, virosomes, liposomes, immunoliposomes, lipid nanoparticles (LNPs), polycation or lipid:nucleic acid conjugates, artificial virions, and agent-enhanced uptake of nucleic acids or can be delivered to plant cells by bacteria or viruses (e.g., Agrobacterium, Rhizobium sp. NGR234, Sinorhizoboiummeliloti, Mesorhizobium loti, tobacco mosaic virus, potato virus X, cauliflower mosaic virus and cassava vein mosaic virus). (See, e.g., Chung et al., 2006). Sonoporation using, e.g., the Sonitron 2000 system (Rich-Mar), can also be used for delivery of nucleic acids. Cationic-lipid mediated delivery of proteins and/or nucleic acids is also contemplated as an in vivo, ex vivo, or in vitro delivery method. (See Zuris et al. (2015); see also Coelho et al. (2013); Judge et al. (2006); and Basha et al. (2011)).

[0104] Non-viral vectors, such as transposon-based systems e.g. recombinant Sleeping Beauty transposon systems or recombinant PiggyBac transposon systems, may also be delivered to a target cell and utilized for transposition of a polynucleotide sequence of a molecule of the composition or a polynucleotide sequence encoding a molecule of the composition in the target cell.

[0105] Additional exemplary nucleic acid delivery systems include those provided by Amaxa.RTM. Biosystems (Cologne, Germany), Maxcyte, Inc. (Rockville, Md.), BTX Molecular Delivery Systems (Holliston, Mass.) and Copernicus Therapeutics Inc., (see, e.g., U.S. Pat. No. 6,008,336). Lipofection is described in e.g., U.S. Pat. No. 5,049,386, U.S. Pat. No. 4,946,787; and U.S. Patent No. 4,897,355, and lipofection reagents are sold commercially (e.g., Transfectam.TM., Lipofectin.TM. and Lipofectamine.TM. RNAiMAX). Cationic and neutral lipids that are suitable for efficient receptor-recognition lipofection of polynucleotides include those disclosed in PCT International Publication Nos. WO/1991/017424 and WO/1991/016024. Delivery can be to cells (ex vivo administration) or target tissues (in vivo administration).

[0106] The preparation of lipid:nucleic acid complexes, including targeted liposomes such as immunolipid complexes, is well known to one of skill in the art (see, e.g., Crystal, Science (1995); Blaese et al., (1995); Behr et al., (1994); Remy et al. (1994); Gao and Huang (1995); Ahmad and Allen (1992); U.S. Patent Nos. 4,186,183; 4,217,344; 4,235,871; 4,261,975; 4,485,054; 4,501,728; 4,774,085; 4,837,028; and 4,946,787).

[0107] Additional methods of delivery include the use of packaging the nucleic acids to be delivered into EnGeneIC delivery vehicles (EDVs). These EDVs are specifically delivered to target tissues using bispecific antibodies where one arm of the antibody has specificity for the target tissue and the other has specificity for the EDV. The antibody brings the EDVs to the target cell surface and then the EDV is brought into the cell by endocytosis. Once in the cell, the contents are released (See MacDiarmid et al., 2009).

[0108] The use of RNA or DNA viral based systems for viral mediated delivery of nucleic acids take advantage of highly evolved processes for targeting a virus to specific cells in the body and trafficking the viral payload to the nucleus. Viral vectors can be administered directly to patients (in vivo) or they can be used to treat cells in vitro and the modified cells are administered to patients (ex vivo). Conventional viral based systems for the delivery of nucleic acids include, but are not limited to, retroviral, lentivirus, adenoviral, adeno-associated, vaccinia and herpes simplex virus vectors for gene transfer.

[0109] The tropism of a retrovirus can be altered by incorporating foreign envelope proteins, expanding the potential target population of target cells. Lentiviral vectors are retroviral vectors that are able to transduce or infect non-dividing cells and typically produce high viral titers. Selection of a retroviral gene transfer system depends on the target tissue. Retroviral vectors are comprised of cis-acting long terminal repeats with packaging capacity for up to 6-10 kb of foreign sequence. The minimum cis-acting LTRs are sufficient for replication and packaging of the vectors, which are then used to integrate the therapeutic gene into the target cell to provide permanent transgene expression. Widely used retroviral vectors include those based upon murine leukemia virus (MuLV), gibbon ape leukemia virus (GaLV), Simian Immunodeficiency virus (SIV), human immunodeficiency virus (HIV), and combinations thereof (See, e.g., Buchschacher et al. (1992); Johann et al. (1992); Sommerfelt et al. (1990); Wilson et al. (1989); Miller et al. (1991); PCT International Publication No. WO/1994/026877A1).

[0110] At least six viral vector approaches are currently available for gene transfer in clinical trials, which utilize approaches that involve complementation of defective vectors by genes inserted into helper cell lines to generate the transducing agent.

[0111] pLASN and MFG-S are examples of retroviral vectors that have been used in clinical trials (See Dunbar et al., 1995; Kohn et al., 1995; Malech et al., 1997). PA317/pLASN was the first therapeutic vector used in a gene therapy trial (Blaese et al., 1995). Transduction efficiencies of 50% or greater have been observed for MFG-S packaged vectors. (Ellem et al., (1997); Dranoff et al., 1997).

[0112] Packaging cells are used to form virus particles that are capable of infecting a host cell. Such cells include 293 cells, which package adenovirus, AAV, and Psi-2 cells or PA317 cells, which package retrovirus. Viral vectors used in gene therapy are usually generated by a producer cell line that packages a nucleic acid vector into a viral particle. The vectors typically contain the minimal viral sequences required for packaging and subsequent integration into a host (if applicable), other viral sequences being replaced by an expression cassette encoding the protein to be expressed. The missing viral functions are supplied in trans by the packaging cell line. For example, AAV vectors used in gene therapy typically only possess inverted terminal repeat (ITR) sequences from the AAV genome which are required for packaging and integration into the host genome. Viral DNA is packaged in a cell line, which contains a helper plasmid encoding the other AAV genes, namely rep and cap, but lacking ITR sequences. The cell line is also infected with adenovirus as a helper. The helper virus promotes replication of the AAV vector and expression of AAV genes from the helper plasmid. The helper plasmid is not packaged in significant amounts due to a lack of ITR sequences. Contamination with adenovirus can be reduced by, e.g., heat treatment to which adenovirus is more sensitive than AAV. Additionally, AAV can be produced at clinical scale using baculovirus systems (see U.S. Pat. No. 7,479,554).

[0113] In many gene therapy applications, it is desirable that the gene therapy vector be delivered with a high degree of specificity to a particular tissue type. Accordingly, a viral vector can be modified to have specificity for a given cell type by expressing a ligand as a fusion protein with a viral coat protein on the outer surface of the virus. The ligand is chosen to have affinity for a receptor known to be present on the cell type of interest. For example, Han et al. (1995) reported that Moloney murine leukemia virus can be modified to express human heregulin fused to gp70, and the recombinant virus infects certain human breast cancer cells expressing human epidermal growth factor receptor. This principle can be extended to other virus-target cell pairs, in which the target cell expresses a receptor and the virus expresses a fusion protein comprising a ligand for the cell-surface receptor. For example, filamentous phage can be engineered to display antibody fragments (e.g., FAB or Fv) having specific binding affinity for virtually any chosen cellular receptor. Although the above description applies primarily to viral vectors, the same principles can be applied to nonviral vectors. Such vectors can be engineered to contain specific uptake sequences which favor uptake by specific target cells.

[0114] Gene therapy vectors can be delivered in vivo by administration to an individual patient, for example by systemic administration (e.g., intravitreal, intravenous, intraperitoneal, intramuscular, subdermal, or intracranial infusion) or topical application, as described below. Preferably, delivery of any one of the compositions disclosed herein is delivered in vivo to photoreceptor cells within the eye of a subject in order to knockout SARM1 expression in photoreceptor cells of the retina. The composition may be delivered to photoreceptor cells by several known means, including by use of virus vehicles (e.g. lentivirus, adeno-associated virus (AAV), etc.), nanoparticles, or delivery of naked RNA compositions. The composition may be delivered in vivo to photoreceptor cells of the eye via a subretinal injection, intravitreal injection, or intra-choroid injection.

[0115] Alternatively, vectors can be delivered to cells ex vivo, such as cells explanted from an individual patient (e.g., lymphocytes, bone marrow aspirates, tissue biopsy) or universal donor hematopoietic stem cells, followed by reimplantation of the cells into a patient, optionally after selection for cells which have incorporated the vector. A non-limiting exemplary ex vivo approach may involve removal of tissue (e.g., peripheral blood, bone marrow, and spleen) from a patient for culture, nucleic acid transfer to the cultured cells (e.g., hematopoietic stem cells), followed by grafting the cells to a target tissue (e.g., bone marrow, and spleen) of the patient. In some embodiments, the stem cell or hematopoietic stem cell may be further treated with a viability enhancer.

[0116] Ex vivo cell transfection for diagnostics, research, or for gene therapy (e.g., via re-infusion of the transfected cells into the host organism) is well known to those of skill in the art. In a preferred embodiment, cells are isolated from the subject organism, transfected with a nucleic acid composition, and re-infused back into the subject organism (e.g., patient). Various cell types suitable for ex vivo transfection are well known to those of skill in the art (See, e.g., Freshney, “Culture of Animal Cells, A Manual of Basic Technique and Specialized Applications (6th edition, 2010) and the references cited therein for a discussion of how to isolate and culture cells from patients).

[0117] Vectors (e.g., retroviruses, liposomes, etc.) containing therapeutic nucleic acid compositions can also be administered directly to an organism for transduction of cells in vivo. Administration is by any of the routes normally used for introducing a molecule into ultimate contact with blood or tissue cells including, but not limited to, injection, infusion, topical application (e.g., eye drops and cream) and electroporation. Suitable methods of administering such nucleic acids are available and well known to those of skill in the art, and, although more than one route can be used to administer a particular composition, a particular route can often provide a more immediate and more effective reaction than another route. According to some embodiments, the composition is delivered via IV injection.

[0118] Vectors suitable for introduction of transgenes into immune cells (e.g., T-cells) include non-integrating lentivirus vectors. See, e.g., U.S. Publication No. 2009/0117617.

[0119] Pharmaceutically acceptable carriers are determined in part by the particular composition being administered, as well as by the particular method used to administer the composition. Accordingly, there is a wide variety of suitable formulations of pharmaceutical compositions available, as described below (See, e.g., Remington’s Pharmaceutical Sciences, 17th ed., 1989).

[0120] The disclosed compositions and methods may also be used in the manufacture of a medicament for treating dominant genetic disorders in a patient.

### Examples of RNA Guide Sequence Portions Which Specifically Target Alleles of SARM1 Gene

[0121] Disclosures which include sequences that may interact with a SARM1 sequence in some form include PCT International Application Publication Nos. WO2016/011080, WO2007/096854, WO2008/021290, WO2011/029914, and U.S. Publication No. 2018/0245164, each of which are hereby incorporated by reference. Although a large number of guide sequences can be designed to target the SARM1 gene, the nucleotide sequences described in Table 1 and are identified by SEQ ID NOs: 1-12105 were specifically selected to effectively implement the methods set forth herein.

[0122] Table 1 shows guide sequences designed for use as described in the embodiments above to associate with SARM1 alleles. Each engineered guide molecule is further designed such as to associate with a target genomic DNA sequence of interest that lies next to a protospacer adjacent motif (PAM), e.g., a PAM matching the sequence NGG or NAG, where “N” is any nucleobase. The guide sequences were designed to work in conjunction with one or more different CRISPR nucleases, including, but not limited to, e.g. SpCas9WT (PAM SEQ: NGG), SpCas9.VQR.1 (PAM SEQ: NGAN), SpCas9.VQR.2 (PAM SEQ: NGNG), SpCas9.EQR (PAM SEQ: NGAG), SpCas9.VRER (PAM SEQ: NGCG), SaCas9WT (PAM SEQ: NNGRRT), SpRY (PAM SEQ: NRN or NYN), NmCas9WT (PAM SEQ: NNNNGATT), Cpfl (PAM SEQ: TTTV), or JeCas9WT (PAM SEQ: NNNVRYM). RNA molecules of the present invention are each designed to form complexes in conjunction with one or more different CRISPR nucleases and designed to target polynucleotide sequences of interest utilizing one or more different PAM sequences respective to the CRISPR nuclease utilized.

TABLE 1

Guide sequence portions designed to associate with specific SARM1 gene targets

| Target | SEQ ID NOs: of 20-nucleotide guide sequence portions | SEQ ID NOs: of 21-nucleotide guide sequence portions | SEQ ID NOs: of 22-nucleotide guide sequence portions |
|---|---|---|---|
| 17:28372165_G_C rs782593684_REF | 1-37 | 38-68 | 69-103 |
| 17:28372165_G_C rs782593684_SNP | 3, 19-21, 26, 30, 32, 34, 37, 104-131 | 40, 54, 60-61, 65-67, 132-155 | 69, 72, 76, 88, 94, 98, 100-102, 156-181 |
| 17:28372349_C_CT REF | 182-229 | 230-267 | 268-313 |
| 17:28372349_C_CT SNP | 196, 203, 209, 211, 217, 219-221, 226, 228-229, 314-352 | 246-247, 253-254, 259-262, 264, 266-267, 353-389 | 271, 281, 287-288, 302-305, 310, 312-313, 390-432 |
| 17:28396150 - 17:28396286 Exon 9, including 7nt upstream of Exon 9 to the stop codon | 433-656 | 657-878 | 879-1098 |
| 17:28372033 - 17:28372509 Exon 1, including the ATG start codon to 7nt downstream of Exon 1 | 1-30, 32, 34, 36-37, 182-229, 1099-1838 | 38-67, 230-238, 240-251, 253-257, 259-267, 1839-2531 | 69-102, 268-293, 295-300, 302-313, 2532-3227 |
| 17:28381196 - 17:28381828 Exon 2, including 7nt upstream and 7nt downstream to Exon 2 | 3228-4439 | 4440-5613 | 5614-6803 |
| 17:28384350 - 17:28384576 Exon 3, including 7nt upstream and 7nt downstream to Exon 3 | 6804-7207 | 7208-7607 | 7608-8007 |
| 17:28384832 - 17:28384937 Exon 4, including 7nt upstream and 7nt downstream to Exon 4 | 8008-8169 | 8170-8329 | 8330-8487 |
| 17:28385033 - 17:28385282 Exon 5, including 7nt upstream and 7nt downstream to Exon 5 | 8488-8937 | 8938-9385 | 9386-9831 |
| 17:28388167 - 17:28388283 Exon 6, including 7nt upstream and 7nt downstream to Exon 6 | 9832-10015 | 10016-10197 | 10198-10377 |
| 17:28388343 - 17:28388546 Exon 7, including 7nt upstream and 7nt downstream to Exon 7 | 10378-10735 | 10736-11091 | 11092-11445 |
| 17:28395898 - 17:28396033 Exon 8, including 7nt upstream and 7nt downstream to Exon 8 | 11446-11667 | 11668-11887 | 11888-12105 |

The indicated locations listed in column 1 of the Table 1 are based on gnomAD v3 database and UCSC Genome Browser assembly ID: hg38, Sequencing/Assembly provider ID: Genome Reference Consortium Human GRCh38.p12 (GCA_000001405.27). Assembly date: December 2013 initial release; December 2017 patch release 12.

[0123] Examples are provided below to facilitate a more complete understanding of the invention. The following examples illustrate the exemplary modes of making and practicing the invention. However, the scope of the invention is not limited to specific embodiments disclosed in these Examples, which are for purposes of illustration only.

### Experimental Details

### Example 1: SARM1 Correction Angylsis

[0124] Guide sequence portions comprising 17-50 contiguous nucleotides containing nucleotides in the sequence set forth in any one of SEQ ID NOs: 1-12105 are screened for high on target activity using SpCas9 in HeLa cells. On target activity is determined by DNA capillary electrophoresis analysis.

### Example 2: Additional SARM1 Editing Anaylsis

[0125] Sterile alpha and Toll/interleukin-1 receptor motif-containing 1 (SARM1) is NAD+ hydrolase whose activity is associated with axonal degeneration. To select optimal RNA guide molecules for biallelic knockout of SARM1, 23 RNA guide molecules targeting SARM1 exons were screened in HeLa cells (Table 2). Briefly, an SpCas9 coding plasmid (64 ng) was co-transfected with a DNA plasmid that expresses a RNA guide molecule (20 ng) in a 96 well plate format using jetOPTIMUS® reagent (Polyplus). Cells were harvested 72 h post DNA transfection, genomic DNA was extracted and used for capillary electrophoresis using primers which amplify the endogenous genomic regions. The graphs in FIG. 1A represent the average of % editing ± standard deviation (STDV) of three (3) independent experiments. Analysis of capillary electrophoresis data for all RNA guide molecules shows the activity ranges from 10% to 90%.

[0126] In addition, screens were performed with OMNI-50 (SEQ ID NO: 12119) and OMNI-79 (SEQ ID NO: 12120) CRISPR nucleases in HeLa cells. Transfection conditions were identical to the conditions described for SpCas9 transfections. Editing efficiency was measured by next-generation sequencing (NGS) analysis. For OMNI-50, g13 editing efficiency was 43% (STDV=3.94). For OMNI-79, g33 editing efficiency was 35% (STDV=4.2). See FIG. 1B. Guide sequence portions of the RNA guide molecules are listed in Table 4.

[0127] To validate RNA guide molecules conferring a Sarm1 knockout by non-sense mediated decay (NMD), mouse Neuro-2a cells which express SARM1 were used. To test the effect of the ten (10) most active guide RNA molecules that target human SARM1 from the HeLa screen, we identified ten (10) mouse specific guide RNA molecules that target mouse SARM1 DNA which correspond to the human guides RNA molecules. The activity of the mouse RNA guide molecules was tested in mouse cells. Briefly, 150 × 10³ Neuro-2a cells were mixed with pre-assembled RNPs composed of 105 pmole SpCas9 protein and 120 pmole sgRNAs (see Table 3), mixed with 100 pmole of electroporation enhancer (IDT-1075916), and electroporated using SF cell 4D-nucleofector X Kit S (PBC2-00675, Lonza) by applying the DS-134 program. A fraction of cells was harvested 72 hours post electroporation and genomic DNA was extracted to measure on-target activity by NGS. According to NGS analysis, all guide RNA molecules depicted high insertion or deletion (indel) activity (FIG. 2).

[0128] To assess the effect of the editing on the level of SARM1 transcripts, total RNA was extracted from Neuro-2a cells seven (7) days post electroporation and the mRNA level of Sarm1 was measured by qRT-PCR. The results demonstrate a more than an 80% reduction in the level of Sarm1 mRNA due to nonsense-mediated decay (NMD) (FIG. 3).

[0129] Next, a novel CRISPR nuclease, OMNI-103 (SEQ ID NO: 12121), which displays unique PAM requirements, was tested for editing of SARM1. This nuclease was tested in HeLa cells as described above. To this end, OMNI-103 was transfected into HeLa cells using a corresponding OMNI-P2A-mCherry expression vector (pmOMNI, Table 7) together with an sgRNA molecule designed to target a specific location in the human genome (guide sequence portion (gRNA) sequence listed in Table 5A). At 72 hours, cells were harvested, and half of the cells were used for quantification of transfection efficiency by FACS using mCherry fluorescence as a marker. The rest of the cells were lysed, and their genomic DNA content was used in a PCR reaction which amplified the corresponding putative genomic targets. Amplicons were subjected to NGS and the resulting sequences were then used calculate the percentage of editing events in each target site. Short Insertions or deletions (indels) around the cut site are the typical outcome of repair of DNA ends following nuclease induced DNA cleavage. The calculation of % editing was therefore deduced from the fraction of indels containing sequences within each amplicon. See Table 5B and FIG. 4.

TABLE 2

20-nucleotide guide sequence portion sequences targeting human SARM1 coding sequence

| | | |
|---|---|---|
| Guide sequence portion (gRNA) | Sequence of gRNA | PAM |
| g1 | GGCCCAUGGUGGGCUGCGGG (SEQ ID NO: 28) | UGG |
| g2 | GCGCCUGCUGGAGCAGAUCC (SEQ ID NO: 1584) | UGG |
| g3 | CUCCACCAGUUGGAAGACCU (SEQ ID NO: 1426) | CGG |
| g4 | AGAGACCGCGUGGCGCGCAU (SEQ ID NO: 3315) | UGG |
| g5 | CGUGAUCCUGAACCUGGCGA (SEQ ID NO: 3735) | AGG |
| g6 | GGCAACUGCGCGCUGCACGG (SEQ ID NO: 4112) | GGG |
| g7 | GGCGAGCGGGAAGAGCCACU (SEQ ID NO: 4139) | CGG |
| g8 | CAUCCAGAGCCUGAAACGCC (SEQ ID NO: 6900) | UGG |
| g9 | UGCUGGGCGAGGAGGUGCCA (SEQ ID NO: 7179) | CGG |
| g10 | AGCAACCUGGCGGACUGGCU (SEQ ID NO: 8522) | GGG |
| g11 | GGCGGACUGGCUGGGCAGCC (SEQ ID NO: 8816) | UGG |
| g12 | ACACGCGGUGCAGCAGGGAG (SEQ ID NO: 8496) | CGG |
| g13 | CUCAGACACGCGGUGCAGCA (SEQ ID NO: 8677) | GGG |
| g14 | CACUCCCCGCUGCCCUGUAC (SEQ ID NO: 9875) | UGG |
| g15 | UCCCCGCUGCCCUGUACUGG (SEQ ID NO: 9990) | UGG |
| g16 | UGCCACCAGUACAGGGCAGC (SEQ ID NO: 9998) | GGG |
| g17 | AAGGUGCACCUGCAGCUGCA (SEQ ID NO: 10389) | UGG |
| g18 | CAUGCAAGACCAUGACUGCA (SEQ ID NO: 10498) | AGG |
| g19 | GCAGCUGCAGGUGCACCUUC (SEQ ID NO: 10591) | AGG |
| g20 | GCACCCAAUCCUUGCAGUCA (SEQ ID NO: 10586) | UGG |
| g21 | AUUGUGACUGCUUUAAGCUG (SEQ ID NO: 11491) | CGG |
| g22 | AACAUUGUGCCCAUCAUUGA (SEQ ID NO: 11447) | UGG |
| g23 | CACUCGAAGCCAUCAAUGAU (SEQ ID NO: 11498) | GGG |

TABLE 3

20-nucleotide guide sequence portion sequences targeting mouse Sarm1 coding sequence

| | | |
|---|---|---|
| Guide sequence portion (gRNA) | Sequence of gRNA | PAM |
| g2 mouse | GCGCUUGCUGGAGCAGAUCC (SEQ ID NO: 12111) | UGG |
| g6 mouse | GCGAACUGCGCGCUGCACGG (SEQ ID NO: 12112) | GGG |
| g7 mouse | AGCGAGCGGGAAGAGCCACU (SEQ ID NO: 12113) | CGG |
| g8 mouse | UAUCCAGAGCCUGAAACGCC (SEQ ID NO: 12114) | UGG |
| g12 mouse | ACACGCGGUGCAGCAGGGAG (SEQ ID NO: 8496) | CGG |
| g13 mouse | CUCUGACACGCGGUGCAGCA (SEQ ID NO: 12115) | GGG |
| g14 mouse | CAUUCCCCGCUGCCCUGUAC (SEQ ID NO: 12116) | UGG |
| g15 mouse | UCCCCGCUGCCCUGUACUGG (SEQ ID NO: 9990) | AGG |
| g17 mouse | AAGGUGCACCUGCAGCUUCA (SEQ ID NO: 12117) | CGG |
| g18 mouse | CAUGCAGGACCAUGACUGCA (SEQ ID NO: 12118) | AGG |

TABLE 4

22-nucleotide guide sequence portion sequences targeting human SARM1 coding sequence

| | | | |
|---|---|---|---|
| Guide sequence portion (gRNA) | Sequence of gRNA | PAM | CRISPR nuclease |
| g13 | UGCUCAGACACGCGGUGCAGCA (SEQ ID NO: 9803) | GGG | OMNI-50 |
| g33 | GUAGCGGUGUUGGCGACUAACA (SEQ ID NO: 6567) | AGG | OMNI-79 |

TABLE 5A

22-nucletoide guide sequence portion sequences targeting SNPs located in SARM1 region

| | |
|---|---|
| Guide sequence portion (gRNA) | Sequence of guide sequence portion |
| g42 | CGCGCGGCCUGCACACGCGUCU (SEQ ID NO: 2788) |
| g43 | CGCCACUGCGCGCUGGCGCUGG (SEQ ID NO: 6022) |
| g44 | GUGUCUGAGCAGCAGCUGCUGG (SEQ ID NO: 9753) |
| g45 | GAUGUCUUCAUCAGCUACCGCC (SEQ ID NO:10302) |

TABLE 5B

Quantitative results depicted in FIG. 4

| | % Editing | % mCherry | STDV “% Editing” | STDV “% mCherry” |
|---|---|---|---|---|
| g42 | 24.1566667 | 93.8333333 | 0.215019379 | 0.450924975 |
| g43 | 13.3566667 | 79.2333333 | 3.303957223 | 0.550757055 |
| g44 | 26.6933333 | 94 | 4.196431023 | 1.322875656 |
| g45 | 43.415 | 90.2 | 8.548920985 | 2.4 |

TABLE 6

Novel OMNI CRISPR nucleases, PAM requirements, and sgRNA scaffold sequences

| | | |
|---|---|---|
| OMNI CRISPR Nuclease and gRNA | PAM Sequence | sgRNA Scaffold Sequence |
| OMNI-50 (SEQ ID NO: 12119) with g13 | NGG | UGCUCUGACACGCGGUGCAGCAGUUUGAGAGUU AUGUAAGAAAUUACAUGACGAGUUCAAAUAAAA AUUUAUUCAAACCGCCUAUUUAUAGGCCGCAGA UGUUCUGCAUUAUGCUUGCUAUUGCAAGCUUUU UU (SEQ ID NO: 12122) |
| OMNI-79 (SEQ ID NO: 12120) with g33 | NGR | GUAGCGGUGUUGGCGACUAACAGUUGCCGCUGG AGAAAUCCAGUUGUUAACAAGCAGCUUGACUGC ACCAAAUAAGGCGGGGGCUGCGGCCCUCGCUUU UUU (SEQ ID NO: 12123) |
| OMNI-103 (SEQ ID NO: 12121) with g42 | NNRACT | CGCCACUGCGCGCUGGCGCUGGGUUUGAGAGUA GUGUAAGAAAUUACACUACAAGUUCAAAUAAAA AUUUAUUCAAAUCCAUUUGCUACAUUGUGUAGA AUUUAAAGAUCUGGCAACAGAUCUUUUUUU (SEQ ID NO: 12124) |
| OMNI-103 (SEQ ID NO: 12121) with g43 | NNRACT | GUGUCUGAGCAGCAGCUGCUGGGUUUGAGAGUA GUGUAAGAAAUUACACUACAAGUUCAAAUAAAA AUUUAUUCAAAUCCAUUUGCUACAUUGUGUAGA AUUUAAAGAUCUGGCAACAGAUCUUUUUUU (SEQ ID NO: 12125) |
| OMNI-103 (SEQ ID NO: 12121) with g44 | NNRACT | GAUGUCUUCAUCAGCUACCGCCGUUUGAGAGUA GUGUAAGAAAUUACACUACAAGUUCAAAUAAAA AUUUAUUCAAAUCCAUUUGCUACAUUGUGUAGA AUUUAAAGAUCUGGCAACAGAUCUUUUUUU (SEQ ID NO: 12126) |
| OMNI-103 (SEQ ID NO: 12121) with g45 | NNRACT | UGCUCUGACACGCGGUGCAGCAGUUUGAGAGUU AUGUAAGAAAUUACAUGACGAGUUCAAAUAAAA AUUUAUUCAAACCGCCUAUUUAUAGGCCGCAGA UGUUCUGCAUUAUGCUUGCUAUUGCAAGCUUUU UU (SEQ ID NO: 12127) |

TABLE 7

OMNI CRISPR nuclease mammalian expression plasmid and elements

| | | |
|---|---|---|
| Plasmid Name | Purpose | Elements |
| pmOMNI | Expressing OMNI polypeptide in the mammalian system | CMV promoter - Kozak - SV40 NLS -OMNI ORF (human optimized) - HA - SV40 NLS - P2A - mCherry - bGH poly(A) signal |

TABLE 7

Annex

| | | |
|---|---|---|
| Element | SEQ ID NO of Amino Acid Sequence | SEQ ID NO of DNA sequence |
| HA Tag | SEQ ID NO: 12128 | SEQ ID NO: 12132 |
| NLS | SEQ ID NO: 12129 | SEQ ID NO: 12133 |
| P2A | SEQ ID NO: 12130 | SEQ ID NO: 12134 |
| mCherry | SEQ ID NO: 12131 | SEQ ID NO: 12135 |

### REFERENCES

[0130] 1. Ahmad and Allen (1992) “Antibody-mediated Specific Binging and Cytotoxicity of Lipsome-entrapped Doxorubicin to Lung Cancer Cells in Vitro”, Cancer Research 52:4817-20.

[0131] 2. Anderson (1992) “Human gene therapy”, Science 256:808-13.

[0132] 3. Basha et al. (2011) “Influence of Cationic Lipid Composition on Gene Silencing Properties of Lipid Nanoparticle Formulations of siRNA in Antigen-Presenting Cells”, Mol. Ther. 19(12):2186-200.

[0133] 4. Behr (1994) Gene transfer with synthetic cationic amphiphiles: Prospects for gene therapy”, Bioconjuage Chem 5:382-89.

[0134] 5. Blaese (1995) “Vectors in cancer therapy: how will they deliver”, Cancer Gene Ther. 2:291-97.

[0135] 6. Blaese et al. (1995) “T lympocyte-directed gene therapy for ADA-SCID: initial trial results after 4 years”, Science 270(5235):475-80.

[0136] 7. Buchschacher and Panganiban (1992) “Human immunodeficiency virus vectors for inducible expression of foreign genes”, J. Virol. 66:2731-39.

[0137] 8. Burstein et al. (2017) “New CRISPR-Cas systems from uncultivated microbes”, Nature 542:237-41.

[0138] 9. Chang and Wilson (1987) “Modification of DNA ends can decrease end-joining relative to homologous recombination in mammalian cells”, Proc. Natl. Acad. Sci. USA 84:4959-4963.

[0139] 10. Chung et al. (2006) “Agrobacterium is not alone: gene transfer to plants by viruses and other bacteria”, Trends Plant Sci. 11(1):1-4.

[0140] 11. Coelho et al. (2013) “Safety and efficacy of RNAi therapy for transthyretin amyloidosis” N. Engl. J. Med. 369, 819-829.

[0141] 12. Collias and Beisel (2021) “CRISPR technologies and the search for the PAM-free nuclease”, Nature Communications 12, 555.

[0142] 13. Crystal (1995) “Transfer of genes to humans: early lessons and obstacles to success”, Science 270(5235):404-10.

[0143] 14. Dillon (1993) “Regulation gene expression in gene therapy” Trends in Biotechnology 11(5):167-173.

[0144] 15. Dranoff et al. (1997) “A phase I study of vaccination with autologous, irradiated melanoma cells engineered to secrete human granulocyte macrophage colony stimulating factor”, Hum. Gene Ther. 8(1):111-23.

[0145] 16. Dunbar et al. (1995) “Retrovirally marked CD34-enriched peripheral blood and bone marrow cells contribute to long-term engraftment after autologous transplantation”, Blood 85:3048-57.

[0146] 17. Ellem et al. (1997) “A case report: immune responses and clinical course of the first human use of ganulocyte/macrophage-colony-stimulating-factor-tranduced autologous melanoma cells for immunotherapy”, Cancer Immunol Immunother 44:10-20.

[0147] 18. Gao and Huang (1995) “Cationic liposome-mediated gene transfer” Gene Ther. 2(10):710-22.

[0148] 19. Haddada et al. (1995) “Gene Therapy Using Adenovirus Vectors”, in: The Molecular Repertoire of Adenoviruses III: Biology and Pathogenesis, ed. Doerfler and Böhm, pp. 297-306.

[0149] 20. Han et al. (1995) “Ligand-directed retro-viral targeting of human breast cancer cells”, Proc Natl Acad Sci U.S.A. 92(21):9747-51.

[0150] 21. Hu et al. (2018) “Evolved Cas9 variants with broad PAM compatibility and high DNA specificity”, Nature 556(7699):57-63.

[0151] 22. Jinek et al. (2012) “A programmable dual-RNA-guided DNA endonuclease in adaptive bacterial immunity,” Science 337(6096):816-21.

[0152] 23. Johan et al. (1992) “GLVR1, a receptor for gibbon ape leukemia virus, is homologous to a phosphate permease of Neurospora crassa and is expressed at high levels in the brain and thymus”, J Virol 66(3):1635-40.

[0153] 24. Judge et al. (2006) “Design of noninflammatory synthetic siRNA mediating potent gene silencing in vivo”, Mol Ther. 13(3):494-505.

[0154] 25. Kohn et al. (1995) “Engraftment of gene-modified umbilical cord blood cells in neonates with adnosine deaminase deficiency”, Nature Medicine 1:1017-23.

[0155] 26. Kremer and Perricaudet (1995) “Adenovirus and adeno-associated virus mediated gene transfer”, Br. Med. Bull. 51(1):31-44.

[0156] 27. Macdiarmid et al. (2009) “Sequential treatment of drug-resistant tumors with targeted minicells containing siRNA or a cytotoxic drug”, Nat Biotehcnol. 27(7):643-51.

[0157] 28. Malech et al. (1997) “Prolonged production of NADPH oxidase-corrected granulocyes after gene therapy of chronic granulomatous disease”, PNAS 94(22):12133-38.

[0158] 29. Miller et al. (1991) “Construction and properties of retrovirus packaging cells based on gibbon ape leukemia virus”, J Virol. 65(5):2220-24.

[0159] 30. Miller (1992) “Human gene therapy comes of age”, Nature 357:455-60.

[0160] 31. Mitani and Caskey (1993) “Delivering therapeutic genes - matching approach and application”, Trends in Biotechnology 11(5):162-66.

[0161] 32. Molday et al. (2013) “X-linked juvenile retinoschisis: Clinical diagnosis, genetic analysis, and molecular mechansims”, Prog Retin Eye Res. 31(3): 195-212.

[0162] 33. Nabel and Felgner (1993) “Direct gene transfer for immunotherapy and immunization”, Trends in Biotechnology 11(5):211-15.

[0163] 34. Nishimasu et al. (2018) “Engineered CRISPR-Cas9 nuclease with expanded targeting space”, Science 361(6408):1259-1262.

[0164] 35. Remy et al. (1994) “Gene Transfer with a Series of Lipphilic DNA-Binding Molecules”, Bioconjugate Chem. 5(6):647-54.

[0165] 36. Sentmanat et al. (2018) “A Survey of Validation Strategies for CRISPR-Cas9 Editing”, Scientific Reports 8:888, doi:10.1038/s41598-018-19441-8.

[0166] 37. Sommerfelt et al. (1990) “Localization of the receptor gene for type D simian retroviruses on human chromosome 19”, J. Virol. 64(12):6214-20.

[0167] 38. Van Brunt (1988) “Molecular framing: transgenic animals as bioactors” Biotechnology 6:1149-54.

[0168] 39. Vigne et al. (1995) “Third-generation adenovectors for gene therapy”, Restorative Neurology and Neuroscience 8(1,2): 35-36.

[0169] 40. Walton et al. (2020) “Unconstrained genome targeting with near-PAMless engineered CRISPR-Cas9 variants”, Science 368(6488):290-296.

[0170] 41. Weissman and Kariko (2015) “mRNA:Fulfilling the promise of gene therapy”, Molecular Therapy (9):1416-7.

[0171] 42. Wilson et al. (1989) “Formation of infectious hybrid virion with gibbon ape leukemia virus and human T-cell leukemia virus retroviral envelope glycoproteins and the gag and pol proteins of Moloney murine leukemia virus”, J. Virol. 63:2374-78.

[0172] 43. Yu et al. (1994) “Progress towards gene therapy for HIV infection”, Gene Ther. 1(1):13-26.

[0173] 44. Zetsche et al. (2015) “Cpf1 is a single RNA-guided endonuclease of a class 2 CRIPSR-Cas system” Cell 163(3):759-71.

[0174] 45. Zuris et al. (2015) “Cationic lipid-mediated delivery of proteins enables efficient protein based genome editing in vitro and in vivo” Nat Biotechnol. 33(1):73-80.

The application's sequence listing, which the Patent Office published only in electronic form, follows.

SEQUENCE LISTING (12135 sequences)

SEQ ID NO: 1 - RNA, 20 nt, Artificial Sequence
  SARM1 targeting guide sequence portion
acccgcagcccaccaugggc

SEQ ID NO: 2 - RNA, 20 nt, Artificial Sequence
  SARM1 targeting guide sequence portion
acgggcccauggugggcugc

SEQ ID NO: 3 - RNA, 20 nt, Artificial Sequence
  SARM1 targeting guide sequence portion
acuucgcggggcccgcggcc

SEQ ID NO: 4 - RNA, 20 nt, Artificial Sequence
  SARM1 targeting guide sequence portion
auggugggcugcggguggcc

SEQ ID NO: 5 - RNA, 20 nt, Artificial Sequence
  SARM1 targeting guide sequence portion
cacccgcagcccaccauggg

SEQ ID NO: 6 - RNA, 20 nt, Artificial Sequence
  SARM1 targeting guide sequence portion
cacgggcccauggugggcug

SEQ ID NO: 7 - RNA, 20 nt, Artificial Sequence
  SARM1 targeting guide sequence portion
cagcccaccaugggcccgug

SEQ ID NO: 8 - RNA, 20 nt, Artificial Sequence
  SARM1 targeting guide sequence portion
cauggugggcugcggguggc

SEQ ID NO: 9 - RNA, 20 nt, Artificial Sequence
  SARM1 targeting guide sequence portion
ccacccgcagcccaccaugg

SEQ ID NO: 10 - RNA, 20 nt, Artificial Sequence
  SARM1 targeting guide sequence portion
ccauggugggcugcgggugg

SEQ ID NO: 11 - RNA, 20 nt, Artificial Sequence
  SARM1 targeting guide sequence portion
cccauggugggcugcgggug

SEQ ID NO: 12 - RNA, 20 nt, Artificial Sequence
  SARM1 targeting guide sequence portion
cccgcagcccaccaugggcc

SEQ ID NO: 13 - RNA, 20 nt, Artificial Sequence
  SARM1 targeting guide sequence portion
ccgcagcccaccaugggccc

SEQ ID NO: 14 - RNA, 20 nt, Artificial Sequence
  SARM1 targeting guide sequence portion
ccgcggccacccgcagccca

SEQ ID NO: 15 - RNA, 20 nt, Artificial Sequence
  SARM1 targeting guide sequence portion
cgcagcccaccaugggcccg

SEQ ID NO: 16 - RNA, 20 nt, Artificial Sequence
  SARM1 targeting guide sequence portion
cgcggccacccgcagcccac

SEQ ID NO: 17 - RNA, 20 nt, Artificial Sequence
  SARM1 targeting guide sequence portion
cggccacccgcagcccacca

SEQ ID NO: 18 - RNA, 20 nt, Artificial Sequence
  SARM1 targeting guide sequence portion
cgggcccauggugggcugcg

SEQ ID NO: 19 - RNA, 20 nt, Artificial Sequence
  SARM1 targeting guide sequence portion
cgguggcacgggcccauggu

SEQ ID NO: 20 - RNA, 20 nt, Artificial Sequence
  SARM1 targeting guide sequence portion
cuucgcggggcccgcggcca

SEQ ID NO: 21 - RNA, 20 nt, Artificial Sequence
  SARM1 targeting guide sequence portion
gcacgggcccauggugggcu

SEQ ID NO: 22 - RNA, 20 nt, Artificial Sequence
  SARM1 targeting guide sequence portion
gcagcccaccaugggcccgu

SEQ ID NO: 23 - RNA, 20 nt, Artificial Sequence
  SARM1 targeting guide sequence portion
gccacccgcagcccaccaug

SEQ ID NO: 24 - RNA, 20 nt, Artificial Sequence
  SARM1 targeting guide sequence portion
gcccauggugggcugcgggu

SEQ ID NO: 25 - RNA, 20 nt, Artificial Sequence
  SARM1 targeting guide sequence portion
gcggccacccgcagcccacc

SEQ ID NO: 26 - RNA, 20 nt, Artificial Sequence
  SARM1 targeting guide sequence portion
ggcacgggcccauggugggc

SEQ ID NO: 27 - RNA, 20 nt, Artificial Sequence
  SARM1 targeting guide sequence portion
ggccacccgcagcccaccau

SEQ ID NO: 28 - RNA, 20 nt, Artificial Sequence
  SARM1 targeting guide sequence portion
ggcccauggugggcugcggg

SEQ ID NO: 29 - RNA, 20 nt, Artificial Sequence
  SARM1 targeting guide sequence portion
gggcccauggugggcugcgg

SEQ ID NO: 30 - RNA, 20 nt, Artificial Sequence
  SARM1 targeting guide sequence portion
gguggcacgggcccauggug

SEQ ID NO: 31 - RNA, 20 nt, Artificial Sequence
  SARM1 targeting guide sequence portion
ggugggcugcggguggccgc

SEQ ID NO: 32 - RNA, 20 nt, Artificial Sequence
  SARM1 targeting guide sequence portion
guggcacgggcccauggugg

SEQ ID NO: 33 - RNA, 20 nt, Artificial Sequence
  SARM1 targeting guide sequence portion
gugggcugcggguggccgcg

SEQ ID NO: 34 - RNA, 20 nt, Artificial Sequence
  SARM1 targeting guide sequence portion
uggcacgggcccaugguggg

SEQ ID NO: 35 - RNA, 20 nt, Artificial Sequence
  SARM1 targeting guide sequence portion
ugggcugcggguggccgcgg

SEQ ID NO: 36 - RNA, 20 nt, Artificial Sequence
  SARM1 targeting guide sequence portion
uggugggcugcggguggccg

SEQ ID NO: 37 - RNA, 20 nt, Artificial Sequence
  SARM1 targeting guide sequence portion
uucgcggggcccgcggccac

SEQ ID NO: 38 - RNA, 21 nt, Artificial Sequence
  SARM1 targeting guide sequence portion
acccgcagcccaccaugggcc

SEQ ID NO: 39 - RNA, 21 nt, Artificial Sequence
  SARM1 targeting guide sequence portion
acgggcccauggugggcugcg

SEQ ID NO: 40 - RNA, 21 nt, Artificial Sequence
  SARM1 targeting guide sequence portion
acuucgcggggcccgcggcca

SEQ ID NO: 41 - RNA, 21 nt, Artificial Sequence
  SARM1 targeting guide sequence portion
auggugggcugcggguggccg

SEQ ID NO: 42 - RNA, 21 nt, Artificial Sequence
  SARM1 targeting guide sequence portion
cacccgcagcccaccaugggc

SEQ ID NO: 43 - RNA, 21 nt, Artificial Sequence
  SARM1 targeting guide sequence portion
cacgggcccauggugggcugc

SEQ ID NO: 44 - RNA, 21 nt, Artificial Sequence
  SARM1 targeting guide sequence portion
cagcccaccaugggcccgugc

SEQ ID NO: 45 - RNA, 21 nt, Artificial Sequence
  SARM1 targeting guide sequence portion
cauggugggcugcggguggcc

SEQ ID NO: 46 - RNA, 21 nt, Artificial Sequence
  SARM1 targeting guide sequence portion
ccacccgcagcccaccauggg

SEQ ID NO: 47 - RNA, 21 nt, Artificial Sequence
  SARM1 targeting guide sequence portion
ccauggugggcugcggguggc

SEQ ID NO: 48 - RNA, 21 nt, Artificial Sequence
  SARM1 targeting guide sequence portion
cccauggugggcugcgggugg

SEQ ID NO: 49 - RNA, 21 nt, Artificial Sequence
  SARM1 targeting guide sequence portion
cccgcagcccaccaugggccc

SEQ ID NO: 50 - RNA, 21 nt, Artificial Sequence
  SARM1 targeting guide sequence portion
ccgcagcccaccaugggcccg

SEQ ID NO: 51 - RNA, 21 nt, Artificial Sequence
  SARM1 targeting guide sequence portion
cgcagcccaccaugggcccgu

SEQ ID NO: 52 - RNA, 21 nt, Artificial Sequence
  SARM1 targeting guide sequence portion
cggccacccgcagcccaccau

SEQ ID NO: 53 - RNA, 21 nt, Artificial Sequence
  SARM1 targeting guide sequence portion
cgggcccauggugggcugcgg

SEQ ID NO: 54 - RNA, 21 nt, Artificial Sequence
  SARM1 targeting guide sequence portion
cgguggcacgggcccauggug

SEQ ID NO: 55 - RNA, 21 nt, Artificial Sequence
  SARM1 targeting guide sequence portion
gcacgggcccauggugggcug

SEQ ID NO: 56 - RNA, 21 nt, Artificial Sequence
  SARM1 targeting guide sequence portion
gcagcccaccaugggcccgug

SEQ ID NO: 57 - RNA, 21 nt, Artificial Sequence
  SARM1 targeting guide sequence portion
gccacccgcagcccaccaugg

SEQ ID NO: 58 - RNA, 21 nt, Artificial Sequence
  SARM1 targeting guide sequence portion
gcccauggugggcugcgggug

SEQ ID NO: 59 - RNA, 21 nt, Artificial Sequence
  SARM1 targeting guide sequence portion
gcggccacccgcagcccacca

SEQ ID NO: 60 - RNA, 21 nt, Artificial Sequence
  SARM1 targeting guide sequence portion
gcgguggcacgggcccauggu

SEQ ID NO: 61 - RNA, 21 nt, Artificial Sequence
  SARM1 targeting guide sequence portion
ggcacgggcccauggugggcu

SEQ ID NO: 62 - RNA, 21 nt, Artificial Sequence
  SARM1 targeting guide sequence portion
ggccacccgcagcccaccaug

SEQ ID NO: 63 - RNA, 21 nt, Artificial Sequence
  SARM1 targeting guide sequence portion
ggcccauggugggcugcgggu

SEQ ID NO: 64 - RNA, 21 nt, Artificial Sequence
  SARM1 targeting guide sequence portion
gggcccauggugggcugcggg

SEQ ID NO: 65 - RNA, 21 nt, Artificial Sequence
  SARM1 targeting guide sequence portion
gguggcacgggcccauggugg

SEQ ID NO: 66 - RNA, 21 nt, Artificial Sequence
  SARM1 targeting guide sequence portion
guggcacgggcccaugguggg

SEQ ID NO: 67 - RNA, 21 nt, Artificial Sequence
  SARM1 targeting guide sequence portion
uggcacgggcccauggugggc

SEQ ID NO: 68 - RNA, 21 nt, Artificial Sequence
  SARM1 targeting guide sequence portion
uggugggcugcggguggccgc

SEQ ID NO: 69 - RNA, 22 nt, Artificial Sequence
  SARM1 targeting guide sequence portion
acacuucgcggggcccgcggcc

SEQ ID NO: 70 - RNA, 22 nt, Artificial Sequence
  SARM1 targeting guide sequence portion
acccgcagcccaccaugggccc

SEQ ID NO: 71 - RNA, 22 nt, Artificial Sequence
  SARM1 targeting guide sequence portion
acgggcccauggugggcugcgg

SEQ ID NO: 72 - RNA, 22 nt, Artificial Sequence
  SARM1 targeting guide sequence portion
acuucgcggggcccgcggccac

SEQ ID NO: 73 - RNA, 22 nt, Artificial Sequence
  SARM1 targeting guide sequence portion
auggugggcugcggguggccgc

SEQ ID NO: 74 - RNA, 22 nt, Artificial Sequence
  SARM1 targeting guide sequence portion
cacccgcagcccaccaugggcc

SEQ ID NO: 75 - RNA, 22 nt, Artificial Sequence
  SARM1 targeting guide sequence portion
cacgggcccauggugggcugcg

SEQ ID NO: 76 - RNA, 22 nt, Artificial Sequence
  SARM1 targeting guide sequence portion
cacuucgcggggcccgcggcca

SEQ ID NO: 77 - RNA, 22 nt, Artificial Sequence
  SARM1 targeting guide sequence portion
cagcccaccaugggcccgugcc

SEQ ID NO: 78 - RNA, 22 nt, Artificial Sequence
  SARM1 targeting guide sequence portion
cauggugggcugcggguggccg

SEQ ID NO: 79 - RNA, 22 nt, Artificial Sequence
  SARM1 targeting guide sequence portion
ccacccgcagcccaccaugggc

SEQ ID NO: 80 - RNA, 22 nt, Artificial Sequence
  SARM1 targeting guide sequence portion
ccauggugggcugcggguggcc

SEQ ID NO: 81 - RNA, 22 nt, Artificial Sequence
  SARM1 targeting guide sequence portion
cccauggugggcugcggguggc

SEQ ID NO: 82 - RNA, 22 nt, Artificial Sequence
  SARM1 targeting guide sequence portion
cccgcagcccaccaugggcccg

SEQ ID NO: 83 - RNA, 22 nt, Artificial Sequence
  SARM1 targeting guide sequence portion
ccgcagcccaccaugggcccgu

SEQ ID NO: 84 - RNA, 22 nt, Artificial Sequence
  SARM1 targeting guide sequence portion
cgcagcccaccaugggcccgug

SEQ ID NO: 85 - RNA, 22 nt, Artificial Sequence
  SARM1 targeting guide sequence portion
cgcggccacccgcagcccacca

SEQ ID NO: 86 - RNA, 22 nt, Artificial Sequence
  SARM1 targeting guide sequence portion
cggccacccgcagcccaccaug

SEQ ID NO: 87 - RNA, 22 nt, Artificial Sequence
  SARM1 targeting guide sequence portion
cgggcccauggugggcugcggg

SEQ ID NO: 88 - RNA, 22 nt, Artificial Sequence
  SARM1 targeting guide sequence portion
cgguggcacgggcccauggugg

SEQ ID NO: 89 - RNA, 22 nt, Artificial Sequence
  SARM1 targeting guide sequence portion
gcacgggcccauggugggcugc

SEQ ID NO: 90 - RNA, 22 nt, Artificial Sequence
  SARM1 targeting guide sequence portion
gcagcccaccaugggcccgugc

SEQ ID NO: 91 - RNA, 22 nt, Artificial Sequence
  SARM1 targeting guide sequence portion
gccacccgcagcccaccauggg

SEQ ID NO: 92 - RNA, 22 nt, Artificial Sequence
  SARM1 targeting guide sequence portion
gcccauggugggcugcgggugg

SEQ ID NO: 93 - RNA, 22 nt, Artificial Sequence
  SARM1 targeting guide sequence portion
gcggccacccgcagcccaccau

SEQ ID NO: 94 - RNA, 22 nt, Artificial Sequence
  SARM1 targeting guide sequence portion
gcgguggcacgggcccauggug

SEQ ID NO: 95 - RNA, 22 nt, Artificial Sequence
  SARM1 targeting guide sequence portion
ggcacgggcccauggugggcug

SEQ ID NO: 96 - RNA, 22 nt, Artificial Sequence
  SARM1 targeting guide sequence portion
ggccacccgcagcccaccaugg

SEQ ID NO: 97 - RNA, 22 nt, Artificial Sequence
  SARM1 targeting guide sequence portion
ggcccauggugggcugcgggug

SEQ ID NO: 98 - RNA, 22 nt, Artificial Sequence
  SARM1 targeting guide sequence portion
ggcgguggcacgggcccauggu

SEQ ID NO: 99 - RNA, 22 nt, Artificial Sequence
  SARM1 targeting guide sequence portion
gggcccauggugggcugcgggu

SEQ ID NO: 100 - RNA, 22 nt, Artificial Sequence
  SARM1 targeting guide sequence portion
gguggcacgggcccaugguggg

SEQ ID NO: 101 - RNA, 22 nt, Artificial Sequence
  SARM1 targeting guide sequence portion
guggcacgggcccauggugggc

SEQ ID NO: 102 - RNA, 22 nt, Artificial Sequence
  SARM1 targeting guide sequence portion
uggcacgggcccauggugggcu

SEQ ID NO: 103 - RNA, 22 nt, Artificial Sequence
  SARM1 targeting guide sequence portion
uggugggcugcggguggccgcg

SEQ ID NO: 104 - RNA, 20 nt, Artificial Sequence
  SARM1 targeting guide sequence portion
acccggagcccaccaugggc

SEQ ID NO: 105 - RNA, 20 nt, Artificial Sequence
  SARM1 targeting guide sequence portion
acgggcccauggugggcucc

SEQ ID NO: 106 - RNA, 20 nt, Artificial Sequence
  SARM1 targeting guide sequence portion
auggugggcuccggguggcc

SEQ ID NO: 107 - RNA, 20 nt, Artificial Sequence
  SARM1 targeting guide sequence portion
cacccggagcccaccauggg

SEQ ID NO: 108 - RNA, 20 nt, Artificial Sequence
  SARM1 targeting guide sequence portion
cacgggcccauggugggcuc

SEQ ID NO: 109 - RNA, 20 nt, Artificial Sequence
  SARM1 targeting guide sequence portion
cauggugggcuccggguggc

SEQ ID NO: 110 - RNA, 20 nt, Artificial Sequence
  SARM1 targeting guide sequence portion
ccacccggagcccaccaugg

SEQ ID NO: 111 - RNA, 20 nt, Artificial Sequence
  SARM1 targeting guide sequence portion
ccauggugggcuccgggugg

SEQ ID NO: 112 - RNA, 20 nt, Artificial Sequence
  SARM1 targeting guide sequence portion
cccauggugggcuccgggug

SEQ ID NO: 113 - RNA, 20 nt, Artificial Sequence
  SARM1 targeting guide sequence portion
cccggagcccaccaugggcc

SEQ ID NO: 114 - RNA, 20 nt, Artificial Sequence
  SARM1 targeting guide sequence portion
ccgcggccacccggagccca

SEQ ID NO: 115 - RNA, 20 nt, Artificial Sequence
  SARM1 targeting guide sequence portion
ccggagcccaccaugggccc

SEQ ID NO: 116 - RNA, 20 nt, Artificial Sequence
  SARM1 targeting guide sequence portion
cgcggccacccggagcccac

SEQ ID NO: 117 - RNA, 20 nt, Artificial Sequence
  SARM1 targeting guide sequence portion
cggagcccaccaugggcccg

SEQ ID NO: 118 - RNA, 20 nt, Artificial Sequence
  SARM1 targeting guide sequence portion
cggccacccggagcccacca

SEQ ID NO: 119 - RNA, 20 nt, Artificial Sequence
  SARM1 targeting guide sequence portion
cgggcccauggugggcuccg

SEQ ID NO: 120 - RNA, 20 nt, Artificial Sequence
  SARM1 targeting guide sequence portion
gagcccaccaugggcccgug

SEQ ID NO: 121 - RNA, 20 nt, Artificial Sequence
  SARM1 targeting guide sequence portion
gccacccggagcccaccaug

SEQ ID NO: 122 - RNA, 20 nt, Artificial Sequence
  SARM1 targeting guide sequence portion
gcccauggugggcuccgggu

SEQ ID NO: 123 - RNA, 20 nt, Artificial Sequence
  SARM1 targeting guide sequence portion
gcggccacccggagcccacc

SEQ ID NO: 124 - RNA, 20 nt, Artificial Sequence
  SARM1 targeting guide sequence portion
ggagcccaccaugggcccgu

SEQ ID NO: 125 - RNA, 20 nt, Artificial Sequence
  SARM1 targeting guide sequence portion
ggccacccggagcccaccau

SEQ ID NO: 126 - RNA, 20 nt, Artificial Sequence
  SARM1 targeting guide sequence portion
ggcccauggugggcuccggg

SEQ ID NO: 127 - RNA, 20 nt, Artificial Sequence
  SARM1 targeting guide sequence portion
gggcccauggugggcuccgg

SEQ ID NO: 128 - RNA, 20 nt, Artificial Sequence
  SARM1 targeting guide sequence portion
ggugggcuccggguggccgc

SEQ ID NO: 129 - RNA, 20 nt, Artificial Sequence
  SARM1 targeting guide sequence portion
gugggcuccggguggccgcg

SEQ ID NO: 130 - RNA, 20 nt, Artificial Sequence
  SARM1 targeting guide sequence portion
ugggcuccggguggccgcgg

SEQ ID NO: 131 - RNA, 20 nt, Artificial Sequence
  SARM1 targeting guide sequence portion
uggugggcuccggguggccg

SEQ ID NO: 132 - RNA, 21 nt, Artificial Sequence
  SARM1 targeting guide sequence portion
acccggagcccaccaugggcc

SEQ ID NO: 133 - RNA, 21 nt, Artificial Sequence
  SARM1 targeting guide sequence portion
acgggcccauggugggcuccg

SEQ ID NO: 134 - RNA, 21 nt, Artificial Sequence
  SARM1 targeting guide sequence portion
auggugggcuccggguggccg

SEQ ID NO: 135 - RNA, 21 nt, Artificial Sequence
  SARM1 targeting guide sequence portion
cacccggagcccaccaugggc

SEQ ID NO: 136 - RNA, 21 nt, Artificial Sequence
  SARM1 targeting guide sequence portion
cacgggcccauggugggcucc

SEQ ID NO: 137 - RNA, 21 nt, Artificial Sequence
  SARM1 targeting guide sequence portion
cauggugggcuccggguggcc

SEQ ID NO: 138 - RNA, 21 nt, Artificial Sequence
  SARM1 targeting guide sequence portion
ccacccggagcccaccauggg

SEQ ID NO: 139 - RNA, 21 nt, Artificial Sequence
  SARM1 targeting guide sequence portion
ccauggugggcuccggguggc

SEQ ID NO: 140 - RNA, 21 nt, Artificial Sequence
  SARM1 targeting guide sequence portion
cccauggugggcuccgggugg

SEQ ID NO: 141 - RNA, 21 nt, Artificial Sequence
  SARM1 targeting guide sequence portion
cccggagcccaccaugggccc

SEQ ID NO: 142 - RNA, 21 nt, Artificial Sequence
  SARM1 targeting guide sequence portion
ccggagcccaccaugggcccg

SEQ ID NO: 143 - RNA, 21 nt, Artificial Sequence
  SARM1 targeting guide sequence portion
cggagcccaccaugggcccgu

SEQ ID NO: 144 - RNA, 21 nt, Artificial Sequence
  SARM1 targeting guide sequence portion
cggccacccggagcccaccau

SEQ ID NO: 145 - RNA, 21 nt, Artificial Sequence
  SARM1 targeting guide sequence portion
cgggcccauggugggcuccgg

SEQ ID NO: 146 - RNA, 21 nt, Artificial Sequence
  SARM1 targeting guide sequence portion
gagcccaccaugggcccgugc

SEQ ID NO: 147 - RNA, 21 nt, Artificial Sequence
  SARM1 targeting guide sequence portion
gcacgggcccauggugggcuc

SEQ ID NO: 148 - RNA, 21 nt, Artificial Sequence
  SARM1 targeting guide sequence portion
gccacccggagcccaccaugg

SEQ ID NO: 149 - RNA, 21 nt, Artificial Sequence
  SARM1 targeting guide sequence portion
gcccauggugggcuccgggug

SEQ ID NO: 150 - RNA, 21 nt, Artificial Sequence
  SARM1 targeting guide sequence portion
gcggccacccggagcccacca

SEQ ID NO: 151 - RNA, 21 nt, Artificial Sequence
  SARM1 targeting guide sequence portion
ggagcccaccaugggcccgug

SEQ ID NO: 152 - RNA, 21 nt, Artificial Sequence
  SARM1 targeting guide sequence portion
ggccacccggagcccaccaug

SEQ ID NO: 153 - RNA, 21 nt, Artificial Sequence
  SARM1 targeting guide sequence portion
ggcccauggugggcuccgggu

SEQ ID NO: 154 - RNA, 21 nt, Artificial Sequence
  SARM1 targeting guide sequence portion
gggcccauggugggcuccggg

SEQ ID NO: 155 - RNA, 21 nt, Artificial Sequence
  SARM1 targeting guide sequence portion
uggugggcuccggguggccgc

SEQ ID NO: 156 - RNA, 22 nt, Artificial Sequence
  SARM1 targeting guide sequence portion
acccggagcccaccaugggccc

SEQ ID NO: 157 - RNA, 22 nt, Artificial Sequence
  SARM1 targeting guide sequence portion
acgggcccauggugggcuccgg

SEQ ID NO: 158 - RNA, 22 nt, Artificial Sequence
  SARM1 targeting guide sequence portion
auggugggcuccggguggccgc

SEQ ID NO: 159 - RNA, 22 nt, Artificial Sequence
  SARM1 targeting guide sequence portion
cacccggagcccaccaugggcc

SEQ ID NO: 160 - RNA, 22 nt, Artificial Sequence
  SARM1 targeting guide sequence portion
cacgggcccauggugggcuccg

SEQ ID NO: 161 - RNA, 22 nt, Artificial Sequence
  SARM1 targeting guide sequence portion
cauggugggcuccggguggccg

SEQ ID NO: 162 - RNA, 22 nt, Artificial Sequence
  SARM1 targeting guide sequence portion
ccacccggagcccaccaugggc

SEQ ID NO: 163 - RNA, 22 nt, Artificial Sequence
  SARM1 targeting guide sequence portion
ccauggugggcuccggguggcc

SEQ ID NO: 164 - RNA, 22 nt, Artificial Sequence
  SARM1 targeting guide sequence portion
cccauggugggcuccggguggc

SEQ ID NO: 165 - RNA, 22 nt, Artificial Sequence
  SARM1 targeting guide sequence portion
cccggagcccaccaugggcccg

SEQ ID NO: 166 - RNA, 22 nt, Artificial Sequence
  SARM1 targeting guide sequence portion
ccggagcccaccaugggcccgu

SEQ ID NO: 167 - RNA, 22 nt, Artificial Sequence
  SARM1 targeting guide sequence portion
cgcggccacccggagcccacca

SEQ ID NO: 168 - RNA, 22 nt, Artificial Sequence
  SARM1 targeting guide sequence portion
cggagcccaccaugggcccgug

SEQ ID NO: 169 - RNA, 22 nt, Artificial Sequence
  SARM1 targeting guide sequence portion
cggccacccggagcccaccaug

SEQ ID NO: 170 - RNA, 22 nt, Artificial Sequence
  SARM1 targeting guide sequence portion
cgggcccauggugggcuccggg

SEQ ID NO: 171 - RNA, 22 nt, Artificial Sequence
  SARM1 targeting guide sequence portion
gagcccaccaugggcccgugcc

SEQ ID NO: 172 - RNA, 22 nt, Artificial Sequence
  SARM1 targeting guide sequence portion
gcacgggcccauggugggcucc

SEQ ID NO: 173 - RNA, 22 nt, Artificial Sequence
  SARM1 targeting guide sequence portion
gccacccggagcccaccauggg

SEQ ID NO: 174 - RNA, 22 nt, Artificial Sequence
  SARM1 targeting guide sequence portion
gcccauggugggcuccgggugg

SEQ ID NO: 175 - RNA, 22 nt, Artificial Sequence
  SARM1 targeting guide sequence portion
gcggccacccggagcccaccau

SEQ ID NO: 176 - RNA, 22 nt, Artificial Sequence
  SARM1 targeting guide sequence portion
ggagcccaccaugggcccgugc

SEQ ID NO: 177 - RNA, 22 nt, Artificial Sequence
  SARM1 targeting guide sequence portion
ggcacgggcccauggugggcuc

SEQ ID NO: 178 - RNA, 22 nt, Artificial Sequence
  SARM1 targeting guide sequence portion
ggccacccggagcccaccaugg

SEQ ID NO: 179 - RNA, 22 nt, Artificial Sequence
  SARM1 targeting guide sequence portion
ggcccauggugggcuccgggug

SEQ ID NO: 180 - RNA, 22 nt, Artificial Sequence
  SARM1 targeting guide sequence portion
gggcccauggugggcuccgggu

SEQ ID NO: 181 - RNA, 22 nt, Artificial Sequence
  SARM1 targeting guide sequence portion
uggugggcuccggguggccgcg

SEQ ID NO: 182 - RNA, 20 nt, Artificial Sequence
  SARM1 targeting guide sequence portion
accucgcggcccacggccgg

SEQ ID NO: 183 - RNA, 20 nt, Artificial Sequence
  SARM1 targeting guide sequence portion
acggccggcagcagccaggc

SEQ ID NO: 184 - RNA, 20 nt, Artificial Sequence
  SARM1 targeting guide sequence portion
aggaggccuggcugcugccg

SEQ ID NO: 185 - RNA, 20 nt, Artificial Sequence
  SARM1 targeting guide sequence portion
aggccuggcugcugccggcc

SEQ ID NO: 186 - RNA, 20 nt, Artificial Sequence
  SARM1 targeting guide sequence portion
cacggccggcagcagccagg

SEQ ID NO: 187 - RNA, 20 nt, Artificial Sequence
  SARM1 targeting guide sequence portion
ccacggccggcagcagccag

SEQ ID NO: 188 - RNA, 20 nt, Artificial Sequence
  SARM1 targeting guide sequence portion
cccacggccggcagcagcca

SEQ ID NO: 189 - RNA, 20 nt, Artificial Sequence
  SARM1 targeting guide sequence portion
ccggcagcagccaggccucc

SEQ ID NO: 190 - RNA, 20 nt, Artificial Sequence
  SARM1 targeting guide sequence portion
ccggccgugggccgcgaggu

SEQ ID NO: 191 - RNA, 20 nt, Artificial Sequence
  SARM1 targeting guide sequence portion
ccuggcugcugccggccgug

SEQ ID NO: 192 - RNA, 20 nt, Artificial Sequence
  SARM1 targeting guide sequence portion
cggcagcagccaggccuccu

SEQ ID NO: 193 - RNA, 20 nt, Artificial Sequence
  SARM1 targeting guide sequence portion
cggcccacggccggcagcag

SEQ ID NO: 194 - RNA, 20 nt, Artificial Sequence
  SARM1 targeting guide sequence portion
cggccggcagcagccaggcc

SEQ ID NO: 195 - RNA, 20 nt, Artificial Sequence
  SARM1 targeting guide sequence portion
cggccgugggccgcgaggua

SEQ ID NO: 196 - RNA, 20 nt, Artificial Sequence
  SARM1 targeting guide sequence portion
cuaccucgcggcccacggcc

SEQ ID NO: 197 - RNA, 20 nt, Artificial Sequence
  SARM1 targeting guide sequence portion
cucgcggcccacggccggca

SEQ ID NO: 198 - RNA, 20 nt, Artificial Sequence
  SARM1 targeting guide sequence portion
cugccggccgugggccgcga

SEQ ID NO: 199 - RNA, 20 nt, Artificial Sequence
  SARM1 targeting guide sequence portion
cugcugccggccgugggccg

SEQ ID NO: 200 - RNA, 20 nt, Artificial Sequence
  SARM1 targeting guide sequence portion
cuggcugcugccggccgugg

SEQ ID NO: 201 - RNA, 20 nt, Artificial Sequence
  SARM1 targeting guide sequence portion
cugggcuaccucgcggccca

SEQ ID NO: 202 - RNA, 20 nt, Artificial Sequence
  SARM1 targeting guide sequence portion
cugguggaggaggccuggcu

SEQ ID NO: 203 - RNA, 20 nt, Artificial Sequence
  SARM1 targeting guide sequence portion
gaggaggccuggcugcugcc

SEQ ID NO: 204 - RNA, 20 nt, Artificial Sequence
  SARM1 targeting guide sequence portion
gaggccuggcugcugccggc

SEQ ID NO: 205 - RNA, 20 nt, Artificial Sequence
  SARM1 targeting guide sequence portion
gcccacggccggcagcagcc

SEQ ID NO: 206 - RNA, 20 nt, Artificial Sequence
  SARM1 targeting guide sequence portion
gccggcagcagccaggccuc

SEQ ID NO: 207 - RNA, 20 nt, Artificial Sequence
  SARM1 targeting guide sequence portion
gccuggcugcugccggccgu

SEQ ID NO: 208 - RNA, 20 nt, Artificial Sequence
  SARM1 targeting guide sequence portion
gcggcccacggccggcagca

SEQ ID NO: 209 - RNA, 20 nt, Artificial Sequence
  SARM1 targeting guide sequence portion
gcuaccucgcggcccacggc

SEQ ID NO: 210 - RNA, 20 nt, Artificial Sequence
  SARM1 targeting guide sequence portion
gcugcugccggccgugggcc

SEQ ID NO: 211 - RNA, 20 nt, Artificial Sequence
  SARM1 targeting guide sequence portion
ggaggaggccuggcugcugc

SEQ ID NO: 212 - RNA, 20 nt, Artificial Sequence
  SARM1 targeting guide sequence portion
ggaggccuggcugcugccgg

SEQ ID NO: 213 - RNA, 20 nt, Artificial Sequence
  SARM1 targeting guide sequence portion
ggcagcagccaggccuccuc

SEQ ID NO: 214 - RNA, 20 nt, Artificial Sequence
  SARM1 targeting guide sequence portion
ggcccacggccggcagcagc

SEQ ID NO: 215 - RNA, 20 nt, Artificial Sequence
  SARM1 targeting guide sequence portion
ggccggcagcagccaggccu

SEQ ID NO: 216 - RNA, 20 nt, Artificial Sequence
  SARM1 targeting guide sequence portion
ggccuggcugcugccggccg

SEQ ID NO: 217 - RNA, 20 nt, Artificial Sequence
  SARM1 targeting guide sequence portion
ggcuaccucgcggcccacgg

SEQ ID NO: 218 - RNA, 20 nt, Artificial Sequence
  SARM1 targeting guide sequence portion
ggcugcugccggccgugggc

SEQ ID NO: 219 - RNA, 20 nt, Artificial Sequence
  SARM1 targeting guide sequence portion
gggcuaccucgcggcccacg

SEQ ID NO: 220 - RNA, 20 nt, Artificial Sequence
  SARM1 targeting guide sequence portion
gguggaggaggccuggcugc

SEQ ID NO: 221 - RNA, 20 nt, Artificial Sequence
  SARM1 targeting guide sequence portion
guggaggaggccuggcugcu

SEQ ID NO: 222 - RNA, 20 nt, Artificial Sequence
  SARM1 targeting guide sequence portion
uaccucgcggcccacggccg

SEQ ID NO: 223 - RNA, 20 nt, Artificial Sequence
  SARM1 targeting guide sequence portion
ucgcggcccacggccggcag

SEQ ID NO: 224 - RNA, 20 nt, Artificial Sequence
  SARM1 targeting guide sequence portion
ugccggccgugggccgcgag

SEQ ID NO: 225 - RNA, 20 nt, Artificial Sequence
  SARM1 targeting guide sequence portion
ugcugccggccgugggccgc

SEQ ID NO: 226 - RNA, 20 nt, Artificial Sequence
  SARM1 targeting guide sequence portion
uggaggaggccuggcugcug

SEQ ID NO: 227 - RNA, 20 nt, Artificial Sequence
  SARM1 targeting guide sequence portion
uggcugcugccggccguggg

SEQ ID NO: 228 - RNA, 20 nt, Artificial Sequence
  SARM1 targeting guide sequence portion
ugggcuaccucgcggcccac

SEQ ID NO: 229 - RNA, 20 nt, Artificial Sequence
  SARM1 targeting guide sequence portion
ugguggaggaggccuggcug

SEQ ID NO: 230 - RNA, 21 nt, Artificial Sequence
  SARM1 targeting guide sequence portion
acggccggcagcagccaggcc

SEQ ID NO: 231 - RNA, 21 nt, Artificial Sequence
  SARM1 targeting guide sequence portion
acugguggaggaggccuggcu

SEQ ID NO: 232 - RNA, 21 nt, Artificial Sequence
  SARM1 targeting guide sequence portion
aggaggccuggcugcugccgg

SEQ ID NO: 233 - RNA, 21 nt, Artificial Sequence
  SARM1 targeting guide sequence portion
aggccuggcugcugccggccg

SEQ ID NO: 234 - RNA, 21 nt, Artificial Sequence
  SARM1 targeting guide sequence portion
cacggccggcagcagccaggc

SEQ ID NO: 235 - RNA, 21 nt, Artificial Sequence
  SARM1 targeting guide sequence portion
ccacggccggcagcagccagg

SEQ ID NO: 236 - RNA, 21 nt, Artificial Sequence
  SARM1 targeting guide sequence portion
cccacggccggcagcagccag

SEQ ID NO: 237 - RNA, 21 nt, Artificial Sequence
  SARM1 targeting guide sequence portion
ccggcagcagccaggccuccu

SEQ ID NO: 238 - RNA, 21 nt, Artificial Sequence
  SARM1 targeting guide sequence portion
ccggccgugggccgcgaggua

SEQ ID NO: 239 - RNA, 21 nt, Artificial Sequence
  SARM1 targeting guide sequence portion
ccuggcugcugccggccgugg

SEQ ID NO: 240 - RNA, 21 nt, Artificial Sequence
  SARM1 targeting guide sequence portion
ccugggcuaccucgcggccca

SEQ ID NO: 241 - RNA, 21 nt, Artificial Sequence
  SARM1 targeting guide sequence portion
cggcagcagccaggccuccuc

SEQ ID NO: 242 - RNA, 21 nt, Artificial Sequence
  SARM1 targeting guide sequence portion
cggccggcagcagccaggccu

SEQ ID NO: 243 - RNA, 21 nt, Artificial Sequence
  SARM1 targeting guide sequence portion
cggccgugggccgcgagguag

SEQ ID NO: 244 - RNA, 21 nt, Artificial Sequence
  SARM1 targeting guide sequence portion
cuaccucgcggcccacggccg

SEQ ID NO: 245 - RNA, 21 nt, Artificial Sequence
  SARM1 targeting guide sequence portion
cuggcugcugccggccguggg

SEQ ID NO: 246 - RNA, 21 nt, Artificial Sequence
  SARM1 targeting guide sequence portion
cugggcuaccucgcggcccac

SEQ ID NO: 247 - RNA, 21 nt, Artificial Sequence
  SARM1 targeting guide sequence portion
cugguggaggaggccuggcug

SEQ ID NO: 248 - RNA, 21 nt, Artificial Sequence
  SARM1 targeting guide sequence portion
gaggaggccuggcugcugccg

SEQ ID NO: 249 - RNA, 21 nt, Artificial Sequence
  SARM1 targeting guide sequence portion
gaggccuggcugcugccggcc

SEQ ID NO: 250 - RNA, 21 nt, Artificial Sequence
  SARM1 targeting guide sequence portion
gcccacggccggcagcagcca

SEQ ID NO: 251 - RNA, 21 nt, Artificial Sequence
  SARM1 targeting guide sequence portion
gccggcagcagccaggccucc

SEQ ID NO: 252 - RNA, 21 nt, Artificial Sequence
  SARM1 targeting guide sequence portion
gccuggcugcugccggccgug

SEQ ID NO: 253 - RNA, 21 nt, Artificial Sequence
  SARM1 targeting guide sequence portion
gcuaccucgcggcccacggcc

SEQ ID NO: 254 - RNA, 21 nt, Artificial Sequence
  SARM1 targeting guide sequence portion
ggaggaggccuggcugcugcc

SEQ ID NO: 255 - RNA, 21 nt, Artificial Sequence
  SARM1 targeting guide sequence portion
ggaggccuggcugcugccggc

SEQ ID NO: 256 - RNA, 21 nt, Artificial Sequence
  SARM1 targeting guide sequence portion
ggcagcagccaggccuccucc

SEQ ID NO: 257 - RNA, 21 nt, Artificial Sequence
  SARM1 targeting guide sequence portion
ggccggcagcagccaggccuc

SEQ ID NO: 258 - RNA, 21 nt, Artificial Sequence
  SARM1 targeting guide sequence portion
ggccuggcugcugccggccgu

SEQ ID NO: 259 - RNA, 21 nt, Artificial Sequence
  SARM1 targeting guide sequence portion
ggcuaccucgcggcccacggc

SEQ ID NO: 260 - RNA, 21 nt, Artificial Sequence
  SARM1 targeting guide sequence portion
gggcuaccucgcggcccacgg

SEQ ID NO: 261 - RNA, 21 nt, Artificial Sequence
  SARM1 targeting guide sequence portion
gguggaggaggccuggcugcu

SEQ ID NO: 262 - RNA, 21 nt, Artificial Sequence
  SARM1 targeting guide sequence portion
guggaggaggccuggcugcug

SEQ ID NO: 263 - RNA, 21 nt, Artificial Sequence
  SARM1 targeting guide sequence portion
uaccucgcggcccacggccgg

SEQ ID NO: 264 - RNA, 21 nt, Artificial Sequence
  SARM1 targeting guide sequence portion
uggaggaggccuggcugcugc

SEQ ID NO: 265 - RNA, 21 nt, Artificial Sequence
  SARM1 targeting guide sequence portion
uggcugcugccggccgugggc

SEQ ID NO: 266 - RNA, 21 nt, Artificial Sequence
  SARM1 targeting guide sequence portion
ugggcuaccucgcggcccacg

SEQ ID NO: 267 - RNA, 21 nt, Artificial Sequence
  SARM1 targeting guide sequence portion
ugguggaggaggccuggcugc

SEQ ID NO: 268 - RNA, 22 nt, Artificial Sequence
  SARM1 targeting guide sequence portion
aacugguggaggaggccuggcu

SEQ ID NO: 269 - RNA, 22 nt, Artificial Sequence
  SARM1 targeting guide sequence portion
accucgcggcccacggccggca

SEQ ID NO: 270 - RNA, 22 nt, Artificial Sequence
  SARM1 targeting guide sequence portion
acggccggcagcagccaggccu

SEQ ID NO: 271 - RNA, 22 nt, Artificial Sequence
  SARM1 targeting guide sequence portion
acugguggaggaggccuggcug

SEQ ID NO: 272 - RNA, 22 nt, Artificial Sequence
  SARM1 targeting guide sequence portion
aggaggccuggcugcugccggc

SEQ ID NO: 273 - RNA, 22 nt, Artificial Sequence
  SARM1 targeting guide sequence portion
aggccuggcugcugccggccgu

SEQ ID NO: 274 - RNA, 22 nt, Artificial Sequence
  SARM1 targeting guide sequence portion
cacggccggcagcagccaggcc

SEQ ID NO: 275 - RNA, 22 nt, Artificial Sequence
  SARM1 targeting guide sequence portion
ccacggccggcagcagccaggc

SEQ ID NO: 276 - RNA, 22 nt, Artificial Sequence
  SARM1 targeting guide sequence portion
cccacggccggcagcagccagg

SEQ ID NO: 277 - RNA, 22 nt, Artificial Sequence
  SARM1 targeting guide sequence portion
cccugggcuaccucgcggccca

SEQ ID NO: 278 - RNA, 22 nt, Artificial Sequence
  SARM1 targeting guide sequence portion
ccggcagcagccaggccuccuc

SEQ ID NO: 279 - RNA, 22 nt, Artificial Sequence
  SARM1 targeting guide sequence portion
ccggccgugggccgcgagguag

SEQ ID NO: 280 - RNA, 22 nt, Artificial Sequence
  SARM1 targeting guide sequence portion
ccuggcugcugccggccguggg

SEQ ID NO: 281 - RNA, 22 nt, Artificial Sequence
  SARM1 targeting guide sequence portion
ccugggcuaccucgcggcccac

SEQ ID NO: 282 - RNA, 22 nt, Artificial Sequence
  SARM1 targeting guide sequence portion
cggcagcagccaggccuccucc

SEQ ID NO: 283 - RNA, 22 nt, Artificial Sequence
  SARM1 targeting guide sequence portion
cggccggcagcagccaggccuc

SEQ ID NO: 284 - RNA, 22 nt, Artificial Sequence
  SARM1 targeting guide sequence portion
cggccgugggccgcgagguagc

SEQ ID NO: 285 - RNA, 22 nt, Artificial Sequence
  SARM1 targeting guide sequence portion
cuaccucgcggcccacggccgg

SEQ ID NO: 286 - RNA, 22 nt, Artificial Sequence
  SARM1 targeting guide sequence portion
cuggcugcugccggccgugggc

SEQ ID NO: 287 - RNA, 22 nt, Artificial Sequence
  SARM1 targeting guide sequence portion
cugggcuaccucgcggcccacg

SEQ ID NO: 288 - RNA, 22 nt, Artificial Sequence
  SARM1 targeting guide sequence portion
cugguggaggaggccuggcugc

SEQ ID NO: 289 - RNA, 22 nt, Artificial Sequence
  SARM1 targeting guide sequence portion
gaggaggccuggcugcugccgg

SEQ ID NO: 290 - RNA, 22 nt, Artificial Sequence
  SARM1 targeting guide sequence portion
gaggccuggcugcugccggccg

SEQ ID NO: 291 - RNA, 22 nt, Artificial Sequence
  SARM1 targeting guide sequence portion
gcccacggccggcagcagccag

SEQ ID NO: 292 - RNA, 22 nt, Artificial Sequence
  SARM1 targeting guide sequence portion
gccggcagcagccaggccuccu

SEQ ID NO: 293 - RNA, 22 nt, Artificial Sequence
  SARM1 targeting guide sequence portion
gccggccgugggccgcgaggua

SEQ ID NO: 294 - RNA, 22 nt, Artificial Sequence
  SARM1 targeting guide sequence portion
gccuggcugcugccggccgugg

SEQ ID NO: 295 - RNA, 22 nt, Artificial Sequence
  SARM1 targeting guide sequence portion
gcuaccucgcggcccacggccg

SEQ ID NO: 296 - RNA, 22 nt, Artificial Sequence
  SARM1 targeting guide sequence portion
ggaggaggccuggcugcugccg

SEQ ID NO: 297 - RNA, 22 nt, Artificial Sequence
  SARM1 targeting guide sequence portion
ggaggccuggcugcugccggcc

SEQ ID NO: 298 - RNA, 22 nt, Artificial Sequence
  SARM1 targeting guide sequence portion
ggcagcagccaggccuccucca

SEQ ID NO: 299 - RNA, 22 nt, Artificial Sequence
  SARM1 targeting guide sequence portion
ggcccacggccggcagcagcca

SEQ ID NO: 300 - RNA, 22 nt, Artificial Sequence
  SARM1 targeting guide sequence portion
ggccggcagcagccaggccucc

SEQ ID NO: 301 - RNA, 22 nt, Artificial Sequence
  SARM1 targeting guide sequence portion
ggccuggcugcugccggccgug

SEQ ID NO: 302 - RNA, 22 nt, Artificial Sequence
  SARM1 targeting guide sequence portion
ggcuaccucgcggcccacggcc

SEQ ID NO: 303 - RNA, 22 nt, Artificial Sequence
  SARM1 targeting guide sequence portion
gggcuaccucgcggcccacggc

SEQ ID NO: 304 - RNA, 22 nt, Artificial Sequence
  SARM1 targeting guide sequence portion
gguggaggaggccuggcugcug

SEQ ID NO: 305 - RNA, 22 nt, Artificial Sequence
  SARM1 targeting guide sequence portion
guggaggaggccuggcugcugc

SEQ ID NO: 306 - RNA, 22 nt, Artificial Sequence
  SARM1 targeting guide sequence portion
uaccucgcggcccacggccggc

SEQ ID NO: 307 - RNA, 22 nt, Artificial Sequence
  SARM1 targeting guide sequence portion
ucgcggcccacggccggcagca

SEQ ID NO: 308 - RNA, 22 nt, Artificial Sequence
  SARM1 targeting guide sequence portion
ugccggccgugggccgcgaggu

SEQ ID NO: 309 - RNA, 22 nt, Artificial Sequence
  SARM1 targeting guide sequence portion
ugcugccggccgugggccgcga

SEQ ID NO: 310 - RNA, 22 nt, Artificial Sequence
  SARM1 targeting guide sequence portion
uggaggaggccuggcugcugcc

SEQ ID NO: 311 - RNA, 22 nt, Artificial Sequence
  SARM1 targeting guide sequence portion
uggcugcugccggccgugggcc

SEQ ID NO: 312 - RNA, 22 nt, Artificial Sequence
  SARM1 targeting guide sequence portion
ugggcuaccucgcggcccacgg

SEQ ID NO: 313 - RNA, 22 nt, Artificial Sequence
  SARM1 targeting guide sequence portion
ugguggaggaggccuggcugcu

SEQ ID NO: 314 - RNA, 20 nt, Artificial Sequence
  SARM1 targeting guide sequence portion
accucgcggcccacggccag

SEQ ID NO: 315 - RNA, 20 nt, Artificial Sequence
  SARM1 targeting guide sequence portion
acggccaggcagcagccagg

SEQ ID NO: 316 - RNA, 20 nt, Artificial Sequence
  SARM1 targeting guide sequence portion
aggaggccuggcugcugccu

SEQ ID NO: 317 - RNA, 20 nt, Artificial Sequence
  SARM1 targeting guide sequence portion
aggcagcagccaggccuccu

SEQ ID NO: 318 - RNA, 20 nt, Artificial Sequence
  SARM1 targeting guide sequence portion
aggccuggcugcugccuggc

SEQ ID NO: 319 - RNA, 20 nt, Artificial Sequence
  SARM1 targeting guide sequence portion
cacggccaggcagcagccag

SEQ ID NO: 320 - RNA, 20 nt, Artificial Sequence
  SARM1 targeting guide sequence portion
caggcagcagccaggccucc

SEQ ID NO: 321 - RNA, 20 nt, Artificial Sequence
  SARM1 targeting guide sequence portion
ccacggccaggcagcagcca

SEQ ID NO: 322 - RNA, 20 nt, Artificial Sequence
  SARM1 targeting guide sequence portion
ccaggcagcagccaggccuc

SEQ ID NO: 323 - RNA, 20 nt, Artificial Sequence
  SARM1 targeting guide sequence portion
cccacggccaggcagcagcc

SEQ ID NO: 324 - RNA, 20 nt, Artificial Sequence
  SARM1 targeting guide sequence portion
ccucgcggcccacggccagg

SEQ ID NO: 325 - RNA, 20 nt, Artificial Sequence
  SARM1 targeting guide sequence portion
ccuggccgugggccgcgagg

SEQ ID NO: 326 - RNA, 20 nt, Artificial Sequence
  SARM1 targeting guide sequence portion
ccuggcugcugccuggccgu

SEQ ID NO: 327 - RNA, 20 nt, Artificial Sequence
  SARM1 targeting guide sequence portion
cgcggcccacggccaggcag

SEQ ID NO: 328 - RNA, 20 nt, Artificial Sequence
  SARM1 targeting guide sequence portion
cggccaggcagcagccaggc

SEQ ID NO: 329 - RNA, 20 nt, Artificial Sequence
  SARM1 targeting guide sequence portion
cggcccacggccaggcagca

SEQ ID NO: 330 - RNA, 20 nt, Artificial Sequence
  SARM1 targeting guide sequence portion
cucgcggcccacggccaggc

SEQ ID NO: 331 - RNA, 20 nt, Artificial Sequence
  SARM1 targeting guide sequence portion
cugccuggccgugggccgcg

SEQ ID NO: 332 - RNA, 20 nt, Artificial Sequence
  SARM1 targeting guide sequence portion
cugcugccuggccgugggcc

SEQ ID NO: 333 - RNA, 20 nt, Artificial Sequence
  SARM1 targeting guide sequence portion
cuggccgugggccgcgaggu

SEQ ID NO: 334 - RNA, 20 nt, Artificial Sequence
  SARM1 targeting guide sequence portion
cuggcugcugccuggccgug

SEQ ID NO: 335 - RNA, 20 nt, Artificial Sequence
  SARM1 targeting guide sequence portion
gaggccuggcugcugccugg

SEQ ID NO: 336 - RNA, 20 nt, Artificial Sequence
  SARM1 targeting guide sequence portion
gccaggcagcagccaggccu

SEQ ID NO: 337 - RNA, 20 nt, Artificial Sequence
  SARM1 targeting guide sequence portion
gcccacggccaggcagcagc

SEQ ID NO: 338 - RNA, 20 nt, Artificial Sequence
  SARM1 targeting guide sequence portion
gccuggccgugggccgcgag

SEQ ID NO: 339 - RNA, 20 nt, Artificial Sequence
  SARM1 targeting guide sequence portion
gccuggcugcugccuggccg

SEQ ID NO: 340 - RNA, 20 nt, Artificial Sequence
  SARM1 targeting guide sequence portion
gcggcccacggccaggcagc

SEQ ID NO: 341 - RNA, 20 nt, Artificial Sequence
  SARM1 targeting guide sequence portion
gcugccuggccgugggccgc

SEQ ID NO: 342 - RNA, 20 nt, Artificial Sequence
  SARM1 targeting guide sequence portion
gcugcugccuggccgugggc

SEQ ID NO: 343 - RNA, 20 nt, Artificial Sequence
  SARM1 targeting guide sequence portion
ggaggccuggcugcugccug

SEQ ID NO: 344 - RNA, 20 nt, Artificial Sequence
  SARM1 targeting guide sequence portion
ggccaggcagcagccaggcc

SEQ ID NO: 345 - RNA, 20 nt, Artificial Sequence
  SARM1 targeting guide sequence portion
ggcccacggccaggcagcag

SEQ ID NO: 346 - RNA, 20 nt, Artificial Sequence
  SARM1 targeting guide sequence portion
ggccuggcugcugccuggcc

SEQ ID NO: 347 - RNA, 20 nt, Artificial Sequence
  SARM1 targeting guide sequence portion
ggcugcugccuggccguggg

SEQ ID NO: 348 - RNA, 20 nt, Artificial Sequence
  SARM1 targeting guide sequence portion
uaccucgcggcccacggcca

SEQ ID NO: 349 - RNA, 20 nt, Artificial Sequence
  SARM1 targeting guide sequence portion
ucgcggcccacggccaggca

SEQ ID NO: 350 - RNA, 20 nt, Artificial Sequence
  SARM1 targeting guide sequence portion
ugccuggccgugggccgcga

SEQ ID NO: 351 - RNA, 20 nt, Artificial Sequence
  SARM1 targeting guide sequence portion
ugcugccuggccgugggccg

SEQ ID NO: 352 - RNA, 20 nt, Artificial Sequence
  SARM1 targeting guide sequence portion
uggcugcugccuggccgugg

SEQ ID NO: 353 - RNA, 21 nt, Artificial Sequence
  SARM1 targeting guide sequence portion
accucgcggcccacggccagg

SEQ ID NO: 354 - RNA, 21 nt, Artificial Sequence
  SARM1 targeting guide sequence portion
acggccaggcagcagccaggc

SEQ ID NO: 355 - RNA, 21 nt, Artificial Sequence
  SARM1 targeting guide sequence portion
aggaggccuggcugcugccug

SEQ ID NO: 356 - RNA, 21 nt, Artificial Sequence
  SARM1 targeting guide sequence portion
aggcagcagccaggccuccuc

SEQ ID NO: 357 - RNA, 21 nt, Artificial Sequence
  SARM1 targeting guide sequence portion
aggccuggcugcugccuggcc

SEQ ID NO: 358 - RNA, 21 nt, Artificial Sequence
  SARM1 targeting guide sequence portion
cacggccaggcagcagccagg

SEQ ID NO: 359 - RNA, 21 nt, Artificial Sequence
  SARM1 targeting guide sequence portion
caggcagcagccaggccuccu

SEQ ID NO: 360 - RNA, 21 nt, Artificial Sequence
  SARM1 targeting guide sequence portion
ccacggccaggcagcagccag

SEQ ID NO: 361 - RNA, 21 nt, Artificial Sequence
  SARM1 targeting guide sequence portion
ccaggcagcagccaggccucc

SEQ ID NO: 362 - RNA, 21 nt, Artificial Sequence
  SARM1 targeting guide sequence portion
cccacggccaggcagcagcca

SEQ ID NO: 363 - RNA, 21 nt, Artificial Sequence
  SARM1 targeting guide sequence portion
ccuggccgugggccgcgaggu

SEQ ID NO: 364 - RNA, 21 nt, Artificial Sequence
  SARM1 targeting guide sequence portion
ccuggcugcugccuggccgug

SEQ ID NO: 365 - RNA, 21 nt, Artificial Sequence
  SARM1 targeting guide sequence portion
cggccaggcagcagccaggcc

SEQ ID NO: 366 - RNA, 21 nt, Artificial Sequence
  SARM1 targeting guide sequence portion
cggcccacggccaggcagcag

SEQ ID NO: 367 - RNA, 21 nt, Artificial Sequence
  SARM1 targeting guide sequence portion
cuaccucgcggcccacggcca

SEQ ID NO: 368 - RNA, 21 nt, Artificial Sequence
  SARM1 targeting guide sequence portion
cucgcggcccacggccaggca

SEQ ID NO: 369 - RNA, 21 nt, Artificial Sequence
  SARM1 targeting guide sequence portion
cugccuggccgugggccgcga

SEQ ID NO: 370 - RNA, 21 nt, Artificial Sequence
  SARM1 targeting guide sequence portion
cugcugccuggccgugggccg

SEQ ID NO: 371 - RNA, 21 nt, Artificial Sequence
  SARM1 targeting guide sequence portion
cuggccgugggccgcgaggua

SEQ ID NO: 372 - RNA, 21 nt, Artificial Sequence
  SARM1 targeting guide sequence portion
cuggcugcugccuggccgugg

SEQ ID NO: 373 - RNA, 21 nt, Artificial Sequence
  SARM1 targeting guide sequence portion
gaggaggccuggcugcugccu

SEQ ID NO: 374 - RNA, 21 nt, Artificial Sequence
  SARM1 targeting guide sequence portion
gaggccuggcugcugccuggc

SEQ ID NO: 375 - RNA, 21 nt, Artificial Sequence
  SARM1 targeting guide sequence portion
gccaggcagcagccaggccuc

SEQ ID NO: 376 - RNA, 21 nt, Artificial Sequence
  SARM1 targeting guide sequence portion
gcccacggccaggcagcagcc

SEQ ID NO: 377 - RNA, 21 nt, Artificial Sequence
  SARM1 targeting guide sequence portion
gccuggcugcugccuggccgu

SEQ ID NO: 378 - RNA, 21 nt, Artificial Sequence
  SARM1 targeting guide sequence portion
gcggcccacggccaggcagca

SEQ ID NO: 379 - RNA, 21 nt, Artificial Sequence
  SARM1 targeting guide sequence portion
gcugcugccuggccgugggcc

SEQ ID NO: 380 - RNA, 21 nt, Artificial Sequence
  SARM1 targeting guide sequence portion
ggaggccuggcugcugccugg

SEQ ID NO: 381 - RNA, 21 nt, Artificial Sequence
  SARM1 targeting guide sequence portion
ggccaggcagcagccaggccu

SEQ ID NO: 382 - RNA, 21 nt, Artificial Sequence
  SARM1 targeting guide sequence portion
ggcccacggccaggcagcagc

SEQ ID NO: 383 - RNA, 21 nt, Artificial Sequence
  SARM1 targeting guide sequence portion
ggccuggcugcugccuggccg

SEQ ID NO: 384 - RNA, 21 nt, Artificial Sequence
  SARM1 targeting guide sequence portion
ggcugcugccuggccgugggc

SEQ ID NO: 385 - RNA, 21 nt, Artificial Sequence
  SARM1 targeting guide sequence portion
uaccucgcggcccacggccag

SEQ ID NO: 386 - RNA, 21 nt, Artificial Sequence
  SARM1 targeting guide sequence portion
ucgcggcccacggccaggcag

SEQ ID NO: 387 - RNA, 21 nt, Artificial Sequence
  SARM1 targeting guide sequence portion
ugccuggccgugggccgcgag

SEQ ID NO: 388 - RNA, 21 nt, Artificial Sequence
  SARM1 targeting guide sequence portion
ugcugccuggccgugggccgc

SEQ ID NO: 389 - RNA, 21 nt, Artificial Sequence
  SARM1 targeting guide sequence portion
uggcugcugccuggccguggg

SEQ ID NO: 390 - RNA, 22 nt, Artificial Sequence
  SARM1 targeting guide sequence portion
accucgcggcccacggccaggc

SEQ ID NO: 391 - RNA, 22 nt, Artificial Sequence
  SARM1 targeting guide sequence portion
acggccaggcagcagccaggcc

SEQ ID NO: 392 - RNA, 22 nt, Artificial Sequence
  SARM1 targeting guide sequence portion
aggaggccuggcugcugccugg

SEQ ID NO: 393 - RNA, 22 nt, Artificial Sequence
  SARM1 targeting guide sequence portion
aggcagcagccaggccuccucc

SEQ ID NO: 394 - RNA, 22 nt, Artificial Sequence
  SARM1 targeting guide sequence portion
aggccuggcugcugccuggccg

SEQ ID NO: 395 - RNA, 22 nt, Artificial Sequence
  SARM1 targeting guide sequence portion
cacggccaggcagcagccaggc

SEQ ID NO: 396 - RNA, 22 nt, Artificial Sequence
  SARM1 targeting guide sequence portion
caggcagcagccaggccuccuc

SEQ ID NO: 397 - RNA, 22 nt, Artificial Sequence
  SARM1 targeting guide sequence portion
ccacggccaggcagcagccagg

SEQ ID NO: 398 - RNA, 22 nt, Artificial Sequence
  SARM1 targeting guide sequence portion
ccaggcagcagccaggccuccu

SEQ ID NO: 399 - RNA, 22 nt, Artificial Sequence
  SARM1 targeting guide sequence portion
cccacggccaggcagcagccag

SEQ ID NO: 400 - RNA, 22 nt, Artificial Sequence
  SARM1 targeting guide sequence portion
ccucgcggcccacggccaggca

SEQ ID NO: 401 - RNA, 22 nt, Artificial Sequence
  SARM1 targeting guide sequence portion
ccuggccgugggccgcgaggua

SEQ ID NO: 402 - RNA, 22 nt, Artificial Sequence
  SARM1 targeting guide sequence portion
ccuggcugcugccuggccgugg

SEQ ID NO: 403 - RNA, 22 nt, Artificial Sequence
  SARM1 targeting guide sequence portion
cgcggcccacggccaggcagca

SEQ ID NO: 404 - RNA, 22 nt, Artificial Sequence
  SARM1 targeting guide sequence portion
cggccaggcagcagccaggccu

SEQ ID NO: 405 - RNA, 22 nt, Artificial Sequence
  SARM1 targeting guide sequence portion
cggcccacggccaggcagcagc

SEQ ID NO: 406 - RNA, 22 nt, Artificial Sequence
  SARM1 targeting guide sequence portion
cuaccucgcggcccacggccag

SEQ ID NO: 407 - RNA, 22 nt, Artificial Sequence
  SARM1 targeting guide sequence portion
cucgcggcccacggccaggcag

SEQ ID NO: 408 - RNA, 22 nt, Artificial Sequence
  SARM1 targeting guide sequence portion
cugccuggccgugggccgcgag

SEQ ID NO: 409 - RNA, 22 nt, Artificial Sequence
  SARM1 targeting guide sequence portion
cugcugccuggccgugggccgc

SEQ ID NO: 410 - RNA, 22 nt, Artificial Sequence
  SARM1 targeting guide sequence portion
cuggccgugggccgcgagguag

SEQ ID NO: 411 - RNA, 22 nt, Artificial Sequence
  SARM1 targeting guide sequence portion
cuggcugcugccuggccguggg

SEQ ID NO: 412 - RNA, 22 nt, Artificial Sequence
  SARM1 targeting guide sequence portion
gaggaggccuggcugcugccug

SEQ ID NO: 413 - RNA, 22 nt, Artificial Sequence
  SARM1 targeting guide sequence portion
gaggccuggcugcugccuggcc

SEQ ID NO: 414 - RNA, 22 nt, Artificial Sequence
  SARM1 targeting guide sequence portion
gccaggcagcagccaggccucc

SEQ ID NO: 415 - RNA, 22 nt, Artificial Sequence
  SARM1 targeting guide sequence portion
gcccacggccaggcagcagcca

SEQ ID NO: 416 - RNA, 22 nt, Artificial Sequence
  SARM1 targeting guide sequence portion
gccuggccgugggccgcgaggu

SEQ ID NO: 417 - RNA, 22 nt, Artificial Sequence
  SARM1 targeting guide sequence portion
gccuggcugcugccuggccgug

SEQ ID NO: 418 - RNA, 22 nt, Artificial Sequence
  SARM1 targeting guide sequence portion
gcggcccacggccaggcagcag

SEQ ID NO: 419 - RNA, 22 nt, Artificial Sequence
  SARM1 targeting guide sequence portion
gcuaccucgcggcccacggcca

SEQ ID NO: 420 - RNA, 22 nt, Artificial Sequence
  SARM1 targeting guide sequence portion
gcugccuggccgugggccgcga

SEQ ID NO: 421 - RNA, 22 nt, Artificial Sequence
  SARM1 targeting guide sequence portion
gcugcugccuggccgugggccg

SEQ ID NO: 422 - RNA, 22 nt, Artificial Sequence
  SARM1 targeting guide sequence portion
ggaggaggccuggcugcugccu

SEQ ID NO: 423 - RNA, 22 nt, Artificial Sequence
  SARM1 targeting guide sequence portion
ggaggccuggcugcugccuggc

SEQ ID NO: 424 - RNA, 22 nt, Artificial Sequence
  SARM1 targeting guide sequence portion
ggccaggcagcagccaggccuc

SEQ ID NO: 425 - RNA, 22 nt, Artificial Sequence
  SARM1 targeting guide sequence portion
ggcccacggccaggcagcagcc

SEQ ID NO: 426 - RNA, 22 nt, Artificial Sequence
  SARM1 targeting guide sequence portion
ggccuggcugcugccuggccgu

SEQ ID NO: 427 - RNA, 22 nt, Artificial Sequence
  SARM1 targeting guide sequence portion
ggcugcugccuggccgugggcc

SEQ ID NO: 428 - RNA, 22 nt, Artificial Sequence
  SARM1 targeting guide sequence portion
uaccucgcggcccacggccagg

SEQ ID NO: 429 - RNA, 22 nt, Artificial Sequence
  SARM1 targeting guide sequence portion
ucgcggcccacggccaggcagc

SEQ ID NO: 430 - RNA, 22 nt, Artificial Sequence
  SARM1 targeting guide sequence portion
ugccuggccgugggccgcgagg

SEQ ID NO: 431 - RNA, 22 nt, Artificial Sequence
  SARM1 targeting guide sequence portion
ugcugccuggccgugggccgcg

SEQ ID NO: 432 - RNA, 22 nt, Artificial Sequence
  SARM1 targeting guide sequence portion
uggcugcugccuggccgugggc

SEQ ID NO: 433 - RNA, 20 nt, Artificial Sequence
  SARM1 targeting guide sequence portion
aaacuggugucagagccugc

SEQ ID NO: 434 - RNA, 20 nt, Artificial Sequence
  SARM1 targeting guide sequence portion
aacuggugucagagccugca

SEQ ID NO: 435 - RNA, 20 nt, Artificial Sequence
  SARM1 targeting guide sequence portion
aagaucauccgcuuccugca

SEQ ID NO: 436 - RNA, 20 nt, Artificial Sequence
  SARM1 targeting guide sequence portion
aagcggaugaucuucucaau

SEQ ID NO: 437 - RNA, 20 nt, Artificial Sequence
  SARM1 targeting guide sequence portion
aauaccaggaggccaccauu

SEQ ID NO: 438 - RNA, 20 nt, Artificial Sequence
  SARM1 targeting guide sequence portion
aaugguggccuccugguauu

SEQ ID NO: 439 - RNA, 20 nt, Artificial Sequence
  SARM1 targeting guide sequence portion
acaccaguuuggagggugcu

SEQ ID NO: 440 - RNA, 20 nt, Artificial Sequence
  SARM1 targeting guide sequence portion
acagguggucccacgaauac

SEQ ID NO: 441 - RNA, 20 nt, Artificial Sequence
  SARM1 targeting guide sequence portion
accaggaggccaccauugag

SEQ ID NO: 442 - RNA, 20 nt, Artificial Sequence
  SARM1 targeting guide sequence portion
accaguuuggagggugcugc

SEQ ID NO: 443 - RNA, 20 nt, Artificial Sequence
  SARM1 targeting guide sequence portion
accauugagaagaucauccg

SEQ ID NO: 444 - RNA, 20 nt, Artificial Sequence
  SARM1 targeting guide sequence portion
acccaugggugcagcacccu

SEQ ID NO: 445 - RNA, 20 nt, Artificial Sequence
  SARM1 targeting guide sequence portion
acccuccaaacuggugucag

SEQ ID NO: 446 - RNA, 20 nt, Artificial Sequence
  SARM1 targeting guide sequence portion
acgaauaccaggaggccacc

SEQ ID NO: 447 - RNA, 20 nt, Artificial Sequence
  SARM1 targeting guide sequence portion
acucaucugcaggcucugac

SEQ ID NO: 448 - RNA, 20 nt, Artificial Sequence
  SARM1 targeting guide sequence portion
acuggugucagagccugcag

SEQ ID NO: 449 - RNA, 20 nt, Artificial Sequence
  SARM1 targeting guide sequence portion
agaagaucauccgcuuccug

SEQ ID NO: 450 - RNA, 20 nt, Artificial Sequence
  SARM1 targeting guide sequence portion
agagccugcagaugaguccc

SEQ ID NO: 451 - RNA, 20 nt, Artificial Sequence
  SARM1 targeting guide sequence portion
agaucauccgcuuccugcag

SEQ ID NO: 452 - RNA, 20 nt, Artificial Sequence
  SARM1 targeting guide sequence portion
agaugagucccgggaggagc

SEQ ID NO: 453 - RNA, 20 nt, Artificial Sequence
  SARM1 targeting guide sequence portion
agcacccuccaaacuggugu

SEQ ID NO: 454 - RNA, 20 nt, Artificial Sequence
  SARM1 targeting guide sequence portion
agccugcagaugagucccgg

SEQ ID NO: 455 - RNA, 20 nt, Artificial Sequence
  SARM1 targeting guide sequence portion
agcggaugaucuucucaaug

SEQ ID NO: 456 - RNA, 20 nt, Artificial Sequence
  SARM1 targeting guide sequence portion
agcggcccugcaggaagcgg

SEQ ID NO: 457 - RNA, 20 nt, Artificial Sequence
  SARM1 targeting guide sequence portion
aggaagcggaugaucuucuc

SEQ ID NO: 458 - RNA, 20 nt, Artificial Sequence
  SARM1 targeting guide sequence portion
aggagcggcccugcaggaag

SEQ ID NO: 459 - RNA, 20 nt, Artificial Sequence
  SARM1 targeting guide sequence portion
aggaggccaccauugagaag

SEQ ID NO: 460 - RNA, 20 nt, Artificial Sequence
  SARM1 targeting guide sequence portion
aggccaccauugagaagauc

SEQ ID NO: 461 - RNA, 20 nt, Artificial Sequence
  SARM1 targeting guide sequence portion
aggcucugacaccaguuugg

SEQ ID NO: 462 - RNA, 20 nt, Artificial Sequence
  SARM1 targeting guide sequence portion
agggccgcuccucccgggac

SEQ ID NO: 463 - RNA, 20 nt, Artificial Sequence
  SARM1 targeting guide sequence portion
agggugcugcacccaugggu

SEQ ID NO: 464 - RNA, 20 nt, Artificial Sequence
  SARM1 targeting guide sequence portion
agguggucccacgaauacca

SEQ ID NO: 465 - RNA, 20 nt, Artificial Sequence
  SARM1 targeting guide sequence portion
agguuggacccaugggugca

SEQ ID NO: 466 - RNA, 20 nt, Artificial Sequence
  SARM1 targeting guide sequence portion
agucccgggaggagcggccc

SEQ ID NO: 467 - RNA, 20 nt, Artificial Sequence
  SARM1 targeting guide sequence portion
aguuuggagggugcugcacc

SEQ ID NO: 468 - RNA, 20 nt, Artificial Sequence
  SARM1 targeting guide sequence portion
auaccaggaggccaccauug

SEQ ID NO: 469 - RNA, 20 nt, Artificial Sequence
  SARM1 targeting guide sequence portion
aucauccgcuuccugcaggg

SEQ ID NO: 470 - RNA, 20 nt, Artificial Sequence
  SARM1 targeting guide sequence portion
auccgcuuccugcagggccg

SEQ ID NO: 471 - RNA, 20 nt, Artificial Sequence
  SARM1 targeting guide sequence portion
aucugcaggcucugacacca

SEQ ID NO: 472 - RNA, 20 nt, Artificial Sequence
  SARM1 targeting guide sequence portion
aucuucucaaugguggccuc

SEQ ID NO: 473 - RNA, 20 nt, Artificial Sequence
  SARM1 targeting guide sequence portion
augagucccgggaggagcgg

SEQ ID NO: 474 - RNA, 20 nt, Artificial Sequence
  SARM1 targeting guide sequence portion
augaucuucucaaugguggc

SEQ ID NO: 475 - RNA, 20 nt, Artificial Sequence
  SARM1 targeting guide sequence portion
augggugcagcacccuccaa

SEQ ID NO: 476 - RNA, 20 nt, Artificial Sequence
  SARM1 targeting guide sequence portion
augguggccuccugguauuc

SEQ ID NO: 477 - RNA, 20 nt, Artificial Sequence
  SARM1 targeting guide sequence portion
auugagaagaucauccgcuu

SEQ ID NO: 478 - RNA, 20 nt, Artificial Sequence
  SARM1 targeting guide sequence portion
caaacuggugucagagccug

SEQ ID NO: 479 - RNA, 20 nt, Artificial Sequence
  SARM1 targeting guide sequence portion
caaugguggccuccugguau

SEQ ID NO: 480 - RNA, 20 nt, Artificial Sequence
  SARM1 targeting guide sequence portion
cacagguggucccacgaaua

SEQ ID NO: 481 - RNA, 20 nt, Artificial Sequence
  SARM1 targeting guide sequence portion
caccaguuuggagggugcug

SEQ ID NO: 482 - RNA, 20 nt, Artificial Sequence
  SARM1 targeting guide sequence portion
caccauugagaagaucaucc

SEQ ID NO: 483 - RNA, 20 nt, Artificial Sequence
  SARM1 targeting guide sequence portion
cacccuccaaacugguguca

SEQ ID NO: 484 - RNA, 20 nt, Artificial Sequence
  SARM1 targeting guide sequence portion
cacgaauaccaggaggccac

SEQ ID NO: 485 - RNA, 20 nt, Artificial Sequence
  SARM1 targeting guide sequence portion
cagagccugcagaugagucc

SEQ ID NO: 486 - RNA, 20 nt, Artificial Sequence
  SARM1 targeting guide sequence portion
cagaugagucccgggaggag

SEQ ID NO: 487 - RNA, 20 nt, Artificial Sequence
  SARM1 targeting guide sequence portion
cagcacccuccaaacuggug

SEQ ID NO: 488 - RNA, 20 nt, Artificial Sequence
  SARM1 targeting guide sequence portion
caggaagcggaugaucuucu

SEQ ID NO: 489 - RNA, 20 nt, Artificial Sequence
  SARM1 targeting guide sequence portion
caggaggccaccauugagaa

SEQ ID NO: 490 - RNA, 20 nt, Artificial Sequence
  SARM1 targeting guide sequence portion
caggcucugacaccaguuug

SEQ ID NO: 491 - RNA, 20 nt, Artificial Sequence
  SARM1 targeting guide sequence portion
cagggccgcuccucccggga

SEQ ID NO: 492 - RNA, 20 nt, Artificial Sequence
  SARM1 targeting guide sequence portion
cagguggucccacgaauacc

SEQ ID NO: 493 - RNA, 20 nt, Artificial Sequence
  SARM1 targeting guide sequence portion
caguuuggagggugcugcac

SEQ ID NO: 494 - RNA, 20 nt, Artificial Sequence
  SARM1 targeting guide sequence portion
cauccgcuuccugcagggcc

SEQ ID NO: 495 - RNA, 20 nt, Artificial Sequence
  SARM1 targeting guide sequence portion
caucugcaggcucugacacc

SEQ ID NO: 496 - RNA, 20 nt, Artificial Sequence
  SARM1 targeting guide sequence portion
caugggugcagcacccucca

SEQ ID NO: 497 - RNA, 20 nt, Artificial Sequence
  SARM1 targeting guide sequence portion
cauugagaagaucauccgcu

SEQ ID NO: 498 - RNA, 20 nt, Artificial Sequence
  SARM1 targeting guide sequence portion
ccaaacuggugucagagccu

SEQ ID NO: 499 - RNA, 20 nt, Artificial Sequence
  SARM1 targeting guide sequence portion
ccacagguggucccacgaau

SEQ ID NO: 500 - RNA, 20 nt, Artificial Sequence
  SARM1 targeting guide sequence portion
ccaccauugagaagaucauc

SEQ ID NO: 501 - RNA, 20 nt, Artificial Sequence
  SARM1 targeting guide sequence portion
ccacgaauaccaggaggcca

SEQ ID NO: 502 - RNA, 20 nt, Artificial Sequence
  SARM1 targeting guide sequence portion
ccaggaggccaccauugaga

SEQ ID NO: 503 - RNA, 20 nt, Artificial Sequence
  SARM1 targeting guide sequence portion
ccaguuuggagggugcugca

SEQ ID NO: 504 - RNA, 20 nt, Artificial Sequence
  SARM1 targeting guide sequence portion
ccaugggugcagcacccucc

SEQ ID NO: 505 - RNA, 20 nt, Artificial Sequence
  SARM1 targeting guide sequence portion
ccauugagaagaucauccgc

SEQ ID NO: 506 - RNA, 20 nt, Artificial Sequence
  SARM1 targeting guide sequence portion
cccacagguggucccacgaa

SEQ ID NO: 507 - RNA, 20 nt, Artificial Sequence
  SARM1 targeting guide sequence portion
cccacgaauaccaggaggcc

SEQ ID NO: 508 - RNA, 20 nt, Artificial Sequence
  SARM1 targeting guide sequence portion
cccaugggugcagcacccuc

SEQ ID NO: 509 - RNA, 20 nt, Artificial Sequence
  SARM1 targeting guide sequence portion
cccgggacucaucugcaggc

SEQ ID NO: 510 - RNA, 20 nt, Artificial Sequence
  SARM1 targeting guide sequence portion
cccgggaggagcggcccugc

SEQ ID NO: 511 - RNA, 20 nt, Artificial Sequence
  SARM1 targeting guide sequence portion
cccuccaaacuggugucaga

SEQ ID NO: 512 - RNA, 20 nt, Artificial Sequence
  SARM1 targeting guide sequence portion
cccugcaggaagcggaugau

SEQ ID NO: 513 - RNA, 20 nt, Artificial Sequence
  SARM1 targeting guide sequence portion
ccgcuccucccgggacucau

SEQ ID NO: 514 - RNA, 20 nt, Artificial Sequence
  SARM1 targeting guide sequence portion
ccgcuuccugcagggccgcu

SEQ ID NO: 515 - RNA, 20 nt, Artificial Sequence
  SARM1 targeting guide sequence portion
ccgggacucaucugcaggcu

SEQ ID NO: 516 - RNA, 20 nt, Artificial Sequence
  SARM1 targeting guide sequence portion
ccgggaggagcggcccugca

SEQ ID NO: 517 - RNA, 20 nt, Artificial Sequence
  SARM1 targeting guide sequence portion
ccuccaaacuggugucagag

SEQ ID NO: 518 - RNA, 20 nt, Artificial Sequence
  SARM1 targeting guide sequence portion
ccucccgggacucaucugca

SEQ ID NO: 519 - RNA, 20 nt, Artificial Sequence
  SARM1 targeting guide sequence portion
ccuccugguauucgugggac

SEQ ID NO: 520 - RNA, 20 nt, Artificial Sequence
  SARM1 targeting guide sequence portion
ccugcagaugagucccggga

SEQ ID NO: 521 - RNA, 20 nt, Artificial Sequence
  SARM1 targeting guide sequence portion
ccugcaggaagcggaugauc

SEQ ID NO: 522 - RNA, 20 nt, Artificial Sequence
  SARM1 targeting guide sequence portion
ccugcagggccgcuccuccc

SEQ ID NO: 523 - RNA, 20 nt, Artificial Sequence
  SARM1 targeting guide sequence portion
ccugguauucgugggaccac

SEQ ID NO: 524 - RNA, 20 nt, Artificial Sequence
  SARM1 targeting guide sequence portion
cgaauaccaggaggccacca

SEQ ID NO: 525 - RNA, 20 nt, Artificial Sequence
  SARM1 targeting guide sequence portion
cgcuccucccgggacucauc

SEQ ID NO: 526 - RNA, 20 nt, Artificial Sequence
  SARM1 targeting guide sequence portion
cgcuuccugcagggccgcuc

SEQ ID NO: 527 - RNA, 20 nt, Artificial Sequence
  SARM1 targeting guide sequence portion
cggaugaucuucucaauggu

SEQ ID NO: 528 - RNA, 20 nt, Artificial Sequence
  SARM1 targeting guide sequence portion
cggcccugcaggaagcggau

SEQ ID NO: 529 - RNA, 20 nt, Artificial Sequence
  SARM1 targeting guide sequence portion
cgggacucaucugcaggcuc

SEQ ID NO: 530 - RNA, 20 nt, Artificial Sequence
  SARM1 targeting guide sequence portion
cgggaggagcggcccugcag

SEQ ID NO: 531 - RNA, 20 nt, Artificial Sequence
  SARM1 targeting guide sequence portion
cucaaugguggccuccuggu

SEQ ID NO: 532 - RNA, 20 nt, Artificial Sequence
  SARM1 targeting guide sequence portion
cucaucugcaggcucugaca

SEQ ID NO: 533 - RNA, 20 nt, Artificial Sequence
  SARM1 targeting guide sequence portion
cuccaaacuggugucagagc

SEQ ID NO: 534 - RNA, 20 nt, Artificial Sequence
  SARM1 targeting guide sequence portion
cucccgggacucaucugcag

SEQ ID NO: 535 - RNA, 20 nt, Artificial Sequence
  SARM1 targeting guide sequence portion
cuccucccgggacucaucug

SEQ ID NO: 536 - RNA, 20 nt, Artificial Sequence
  SARM1 targeting guide sequence portion
cuccugguauucgugggacc

SEQ ID NO: 537 - RNA, 20 nt, Artificial Sequence
  SARM1 targeting guide sequence portion
cucugacaccaguuuggagg

SEQ ID NO: 538 - RNA, 20 nt, Artificial Sequence
  SARM1 targeting guide sequence portion
cugacaccaguuuggagggu

SEQ ID NO: 539 - RNA, 20 nt, Artificial Sequence
  SARM1 targeting guide sequence portion
cugcagaugagucccgggag

SEQ ID NO: 540 - RNA, 20 nt, Artificial Sequence
  SARM1 targeting guide sequence portion
cugcaggaagcggaugaucu

SEQ ID NO: 541 - RNA, 20 nt, Artificial Sequence
  SARM1 targeting guide sequence portion
cugcaggcucugacaccagu

SEQ ID NO: 542 - RNA, 20 nt, Artificial Sequence
  SARM1 targeting guide sequence portion
cugcagggccgcuccucccg

SEQ ID NO: 543 - RNA, 20 nt, Artificial Sequence
  SARM1 targeting guide sequence portion
cugguauucgugggaccacc

SEQ ID NO: 544 - RNA, 20 nt, Artificial Sequence
  SARM1 targeting guide sequence portion
cuggugucagagccugcaga

SEQ ID NO: 545 - RNA, 20 nt, Artificial Sequence
  SARM1 targeting guide sequence portion
cuuccugcagggccgcuccu

SEQ ID NO: 546 - RNA, 20 nt, Artificial Sequence
  SARM1 targeting guide sequence portion
cuucucaaugguggccuccu

SEQ ID NO: 547 - RNA, 20 nt, Artificial Sequence
  SARM1 targeting guide sequence portion
gaagaucauccgcuuccugc

SEQ ID NO: 548 - RNA, 20 nt, Artificial Sequence
  SARM1 targeting guide sequence portion
gaagcggaugaucuucucaa

SEQ ID NO: 549 - RNA, 20 nt, Artificial Sequence
  SARM1 targeting guide sequence portion
gaauaccaggaggccaccau

SEQ ID NO: 550 - RNA, 20 nt, Artificial Sequence
  SARM1 targeting guide sequence portion
gacaccaguuuggagggugc

SEQ ID NO: 551 - RNA, 20 nt, Artificial Sequence
  SARM1 targeting guide sequence portion
gacccaugggugcagcaccc

SEQ ID NO: 552 - RNA, 20 nt, Artificial Sequence
  SARM1 targeting guide sequence portion
gacucaucugcaggcucuga

SEQ ID NO: 553 - RNA, 20 nt, Artificial Sequence
  SARM1 targeting guide sequence portion
gagaagaucauccgcuuccu

SEQ ID NO: 554 - RNA, 20 nt, Artificial Sequence
  SARM1 targeting guide sequence portion
gagccugcagaugagucccg

SEQ ID NO: 555 - RNA, 20 nt, Artificial Sequence
  SARM1 targeting guide sequence portion
gagcggcccugcaggaagcg

SEQ ID NO: 556 - RNA, 20 nt, Artificial Sequence
  SARM1 targeting guide sequence portion
gaggagcggcccugcaggaa

SEQ ID NO: 557 - RNA, 20 nt, Artificial Sequence
  SARM1 targeting guide sequence portion
gaggccaccauugagaagau

SEQ ID NO: 558 - RNA, 20 nt, Artificial Sequence
  SARM1 targeting guide sequence portion
gagggugcugcacccauggg

SEQ ID NO: 559 - RNA, 20 nt, Artificial Sequence
  SARM1 targeting guide sequence portion
gagucccgggaggagcggcc

SEQ ID NO: 560 - RNA, 20 nt, Artificial Sequence
  SARM1 targeting guide sequence portion
gaucauccgcuuccugcagg

SEQ ID NO: 561 - RNA, 20 nt, Artificial Sequence
  SARM1 targeting guide sequence portion
gaucuucucaaugguggccu

SEQ ID NO: 562 - RNA, 20 nt, Artificial Sequence
  SARM1 targeting guide sequence portion
gaugagucccgggaggagcg

SEQ ID NO: 563 - RNA, 20 nt, Artificial Sequence
  SARM1 targeting guide sequence portion
gaugaucuucucaauggugg

SEQ ID NO: 564 - RNA, 20 nt, Artificial Sequence
  SARM1 targeting guide sequence portion
gcacccuccaaacugguguc

SEQ ID NO: 565 - RNA, 20 nt, Artificial Sequence
  SARM1 targeting guide sequence portion
gcagaugagucccgggagga

SEQ ID NO: 566 - RNA, 20 nt, Artificial Sequence
  SARM1 targeting guide sequence portion
gcagcacccuccaaacuggu

SEQ ID NO: 567 - RNA, 20 nt, Artificial Sequence
  SARM1 targeting guide sequence portion
gcaggaagcggaugaucuuc

SEQ ID NO: 568 - RNA, 20 nt, Artificial Sequence
  SARM1 targeting guide sequence portion
gcaggcucugacaccaguuu

SEQ ID NO: 569 - RNA, 20 nt, Artificial Sequence
  SARM1 targeting guide sequence portion
gcagggccgcuccucccggg

SEQ ID NO: 570 - RNA, 20 nt, Artificial Sequence
  SARM1 targeting guide sequence portion
gccaccauugagaagaucau

SEQ ID NO: 571 - RNA, 20 nt, Artificial Sequence
  SARM1 targeting guide sequence portion
gcccugcaggaagcggauga

SEQ ID NO: 572 - RNA, 20 nt, Artificial Sequence
  SARM1 targeting guide sequence portion
gccgcuccucccgggacuca

SEQ ID NO: 573 - RNA, 20 nt, Artificial Sequence
  SARM1 targeting guide sequence portion
gccuccugguauucguggga

SEQ ID NO: 574 - RNA, 20 nt, Artificial Sequence
  SARM1 targeting guide sequence portion
gccugcagaugagucccggg

SEQ ID NO: 575 - RNA, 20 nt, Artificial Sequence
  SARM1 targeting guide sequence portion
gcggaugaucuucucaaugg

SEQ ID NO: 576 - RNA, 20 nt, Artificial Sequence
  SARM1 targeting guide sequence portion
gcggcccugcaggaagcgga

SEQ ID NO: 577 - RNA, 20 nt, Artificial Sequence
  SARM1 targeting guide sequence portion
gcuccucccgggacucaucu

SEQ ID NO: 578 - RNA, 20 nt, Artificial Sequence
  SARM1 targeting guide sequence portion
gcucugacaccaguuuggag

SEQ ID NO: 579 - RNA, 20 nt, Artificial Sequence
  SARM1 targeting guide sequence portion
gcuuccugcagggccgcucc

SEQ ID NO: 580 - RNA, 20 nt, Artificial Sequence
  SARM1 targeting guide sequence portion
ggaagcggaugaucuucuca

SEQ ID NO: 581 - RNA, 20 nt, Artificial Sequence
  SARM1 targeting guide sequence portion
ggacccaugggugcagcacc

SEQ ID NO: 582 - RNA, 20 nt, Artificial Sequence
  SARM1 targeting guide sequence portion
ggacucaucugcaggcucug

SEQ ID NO: 583 - RNA, 20 nt, Artificial Sequence
  SARM1 targeting guide sequence portion
ggagcggcccugcaggaagc

SEQ ID NO: 584 - RNA, 20 nt, Artificial Sequence
  SARM1 targeting guide sequence portion
ggaggagcggcccugcagga

SEQ ID NO: 585 - RNA, 20 nt, Artificial Sequence
  SARM1 targeting guide sequence portion
ggaggccaccauugagaaga

SEQ ID NO: 586 - RNA, 20 nt, Artificial Sequence
  SARM1 targeting guide sequence portion
ggagggugcugcacccaugg

SEQ ID NO: 587 - RNA, 20 nt, Artificial Sequence
  SARM1 targeting guide sequence portion
ggaugaucuucucaauggug

SEQ ID NO: 588 - RNA, 20 nt, Artificial Sequence
  SARM1 targeting guide sequence portion
ggccaccauugagaagauca

SEQ ID NO: 589 - RNA, 20 nt, Artificial Sequence
  SARM1 targeting guide sequence portion
ggcccugcaggaagcggaug

SEQ ID NO: 590 - RNA, 20 nt, Artificial Sequence
  SARM1 targeting guide sequence portion
ggccgcuccucccgggacuc

SEQ ID NO: 591 - RNA, 20 nt, Artificial Sequence
  SARM1 targeting guide sequence portion
ggccuccugguauucguggg

SEQ ID NO: 592 - RNA, 20 nt, Artificial Sequence
  SARM1 targeting guide sequence portion
ggcucugacaccaguuugga

SEQ ID NO: 593 - RNA, 20 nt, Artificial Sequence
  SARM1 targeting guide sequence portion
gggacucaucugcaggcucu

SEQ ID NO: 594 - RNA, 20 nt, Artificial Sequence
  SARM1 targeting guide sequence portion
gggaggagcggcccugcagg

SEQ ID NO: 595 - RNA, 20 nt, Artificial Sequence
  SARM1 targeting guide sequence portion
gggccgcuccucccgggacu

SEQ ID NO: 596 - RNA, 20 nt, Artificial Sequence
  SARM1 targeting guide sequence portion
gggugcagcacccuccaaac

SEQ ID NO: 597 - RNA, 20 nt, Artificial Sequence
  SARM1 targeting guide sequence portion
gggugcugcacccauggguc

SEQ ID NO: 598 - RNA, 20 nt, Artificial Sequence
  SARM1 targeting guide sequence portion
ggucccacgaauaccaggag

SEQ ID NO: 599 - RNA, 20 nt, Artificial Sequence
  SARM1 targeting guide sequence portion
ggugcagcacccuccaaacu

SEQ ID NO: 600 - RNA, 20 nt, Artificial Sequence
  SARM1 targeting guide sequence portion
ggugcugcacccaugggucc

SEQ ID NO: 601 - RNA, 20 nt, Artificial Sequence
  SARM1 targeting guide sequence portion
gguggccuccugguauucgu

SEQ ID NO: 602 - RNA, 20 nt, Artificial Sequence
  SARM1 targeting guide sequence portion
gguggucccacgaauaccag

SEQ ID NO: 603 - RNA, 20 nt, Artificial Sequence
  SARM1 targeting guide sequence portion
ggugucagagccugcagaug

SEQ ID NO: 604 - RNA, 20 nt, Artificial Sequence
  SARM1 targeting guide sequence portion
gguuggacccaugggugcag

SEQ ID NO: 605 - RNA, 20 nt, Artificial Sequence
  SARM1 targeting guide sequence portion
gucagagccugcagaugagu

SEQ ID NO: 606 - RNA, 20 nt, Artificial Sequence
  SARM1 targeting guide sequence portion
gucccacgaauaccaggagg

SEQ ID NO: 607 - RNA, 20 nt, Artificial Sequence
  SARM1 targeting guide sequence portion
gucccgggaggagcggcccu

SEQ ID NO: 608 - RNA, 20 nt, Artificial Sequence
  SARM1 targeting guide sequence portion
gugcagcacccuccaaacug

SEQ ID NO: 609 - RNA, 20 nt, Artificial Sequence
  SARM1 targeting guide sequence portion
gugcugcacccaugggucca

SEQ ID NO: 610 - RNA, 20 nt, Artificial Sequence
  SARM1 targeting guide sequence portion
guggccuccugguauucgug

SEQ ID NO: 611 - RNA, 20 nt, Artificial Sequence
  SARM1 targeting guide sequence portion
guggucccacgaauaccagg

SEQ ID NO: 612 - RNA, 20 nt, Artificial Sequence
  SARM1 targeting guide sequence portion
gugucagagccugcagauga

SEQ ID NO: 613 - RNA, 20 nt, Artificial Sequence
  SARM1 targeting guide sequence portion
guuggacccaugggugcagc

SEQ ID NO: 614 - RNA, 20 nt, Artificial Sequence
  SARM1 targeting guide sequence portion
guuuggagggugcugcaccc

SEQ ID NO: 615 - RNA, 20 nt, Artificial Sequence
  SARM1 targeting guide sequence portion
uaccaggaggccaccauuga

SEQ ID NO: 616 - RNA, 20 nt, Artificial Sequence
  SARM1 targeting guide sequence portion
uagguuggacccaugggugc

SEQ ID NO: 617 - RNA, 20 nt, Artificial Sequence
  SARM1 targeting guide sequence portion
ucaaugguggccuccuggua

SEQ ID NO: 618 - RNA, 20 nt, Artificial Sequence
  SARM1 targeting guide sequence portion
ucagagccugcagaugaguc

SEQ ID NO: 619 - RNA, 20 nt, Artificial Sequence
  SARM1 targeting guide sequence portion
ucauccgcuuccugcagggc

SEQ ID NO: 620 - RNA, 20 nt, Artificial Sequence
  SARM1 targeting guide sequence portion
ucaucugcaggcucugacac

SEQ ID NO: 621 - RNA, 20 nt, Artificial Sequence
  SARM1 targeting guide sequence portion
uccaaacuggugucagagcc

SEQ ID NO: 622 - RNA, 20 nt, Artificial Sequence
  SARM1 targeting guide sequence portion
ucccacgaauaccaggaggc

SEQ ID NO: 623 - RNA, 20 nt, Artificial Sequence
  SARM1 targeting guide sequence portion
ucccgggacucaucugcagg

SEQ ID NO: 624 - RNA, 20 nt, Artificial Sequence
  SARM1 targeting guide sequence portion
ucccgggaggagcggcccug

SEQ ID NO: 625 - RNA, 20 nt, Artificial Sequence
  SARM1 targeting guide sequence portion
uccgcuuccugcagggccgc

SEQ ID NO: 626 - RNA, 20 nt, Artificial Sequence
  SARM1 targeting guide sequence portion
uccucccgggacucaucugc

SEQ ID NO: 627 - RNA, 20 nt, Artificial Sequence
  SARM1 targeting guide sequence portion
uccugcagggccgcuccucc

SEQ ID NO: 628 - RNA, 20 nt, Artificial Sequence
  SARM1 targeting guide sequence portion
uccugguauucgugggacca

SEQ ID NO: 629 - RNA, 20 nt, Artificial Sequence
  SARM1 targeting guide sequence portion
ucucaaugguggccuccugg

SEQ ID NO: 630 - RNA, 20 nt, Artificial Sequence
  SARM1 targeting guide sequence portion
ucugacaccaguuuggaggg

SEQ ID NO: 631 - RNA, 20 nt, Artificial Sequence
  SARM1 targeting guide sequence portion
ucugcaggcucugacaccag

SEQ ID NO: 632 - RNA, 20 nt, Artificial Sequence
  SARM1 targeting guide sequence portion
ucuucucaaugguggccucc

SEQ ID NO: 633 - RNA, 20 nt, Artificial Sequence
  SARM1 targeting guide sequence portion
ugacaccaguuuggagggug

SEQ ID NO: 634 - RNA, 20 nt, Artificial Sequence
  SARM1 targeting guide sequence portion
ugagaagaucauccgcuucc

SEQ ID NO: 635 - RNA, 20 nt, Artificial Sequence
  SARM1 targeting guide sequence portion
ugagucccgggaggagcggc

SEQ ID NO: 636 - RNA, 20 nt, Artificial Sequence
  SARM1 targeting guide sequence portion
ugaucuucucaaugguggcc

SEQ ID NO: 637 - RNA, 20 nt, Artificial Sequence
  SARM1 targeting guide sequence portion
ugcagaugagucccgggagg

SEQ ID NO: 638 - RNA, 20 nt, Artificial Sequence
  SARM1 targeting guide sequence portion
ugcagcacccuccaaacugg

SEQ ID NO: 639 - RNA, 20 nt, Artificial Sequence
  SARM1 targeting guide sequence portion
ugcaggaagcggaugaucuu

SEQ ID NO: 640 - RNA, 20 nt, Artificial Sequence
  SARM1 targeting guide sequence portion
ugcaggcucugacaccaguu

SEQ ID NO: 641 - RNA, 20 nt, Artificial Sequence
  SARM1 targeting guide sequence portion
ugcagggccgcuccucccgg

SEQ ID NO: 642 - RNA, 20 nt, Artificial Sequence
  SARM1 targeting guide sequence portion
uggacccaugggugcagcac

SEQ ID NO: 643 - RNA, 20 nt, Artificial Sequence
  SARM1 targeting guide sequence portion
uggagggugcugcacccaug

SEQ ID NO: 644 - RNA, 20 nt, Artificial Sequence
  SARM1 targeting guide sequence portion
uggccuccugguauucgugg

SEQ ID NO: 645 - RNA, 20 nt, Artificial Sequence
  SARM1 targeting guide sequence portion
ugggugcagcacccuccaaa

SEQ ID NO: 646 - RNA, 20 nt, Artificial Sequence
  SARM1 targeting guide sequence portion
uggucccacgaauaccagga

SEQ ID NO: 647 - RNA, 20 nt, Artificial Sequence
  SARM1 targeting guide sequence portion
ugguggccuccugguauucg

SEQ ID NO: 648 - RNA, 20 nt, Artificial Sequence
  SARM1 targeting guide sequence portion
uggugucagagccugcagau

SEQ ID NO: 649 - RNA, 20 nt, Artificial Sequence
  SARM1 targeting guide sequence portion
ugucagagccugcagaugag

SEQ ID NO: 650 - RNA, 20 nt, Artificial Sequence
  SARM1 targeting guide sequence portion
uuagguuggacccaugggug

SEQ ID NO: 651 - RNA, 20 nt, Artificial Sequence
  SARM1 targeting guide sequence portion
uuccugcagggccgcuccuc

SEQ ID NO: 652 - RNA, 20 nt, Artificial Sequence
  SARM1 targeting guide sequence portion
uucucaaugguggccuccug

SEQ ID NO: 653 - RNA, 20 nt, Artificial Sequence
  SARM1 targeting guide sequence portion
uugagaagaucauccgcuuc

SEQ ID NO: 654 - RNA, 20 nt, Artificial Sequence
  SARM1 targeting guide sequence portion
uuggacccaugggugcagca

SEQ ID NO: 655 - RNA, 20 nt, Artificial Sequence
  SARM1 targeting guide sequence portion
uuggagggugcugcacccau

SEQ ID NO: 656 - RNA, 20 nt, Artificial Sequence
  SARM1 targeting guide sequence portion
uuuggagggugcugcaccca

SEQ ID NO: 657 - RNA, 21 nt, Artificial Sequence
  SARM1 targeting guide sequence portion
aaacuggugucagagccugca

SEQ ID NO: 658 - RNA, 21 nt, Artificial Sequence
  SARM1 targeting guide sequence portion
aacuggugucagagccugcag

SEQ ID NO: 659 - RNA, 21 nt, Artificial Sequence
  SARM1 targeting guide sequence portion
aagaucauccgcuuccugcag

SEQ ID NO: 660 - RNA, 21 nt, Artificial Sequence
  SARM1 targeting guide sequence portion
aagcggaugaucuucucaaug

SEQ ID NO: 661 - RNA, 21 nt, Artificial Sequence
  SARM1 targeting guide sequence portion
aauaccaggaggccaccauug

SEQ ID NO: 662 - RNA, 21 nt, Artificial Sequence
  SARM1 targeting guide sequence portion
aaugguggccuccugguauuc

SEQ ID NO: 663 - RNA, 21 nt, Artificial Sequence
  SARM1 targeting guide sequence portion
acaccaguuuggagggugcug

SEQ ID NO: 664 - RNA, 21 nt, Artificial Sequence
  SARM1 targeting guide sequence portion
acagguggucccacgaauacc

SEQ ID NO: 665 - RNA, 21 nt, Artificial Sequence
  SARM1 targeting guide sequence portion
accaggaggccaccauugaga

SEQ ID NO: 666 - RNA, 21 nt, Artificial Sequence
  SARM1 targeting guide sequence portion
accaguuuggagggugcugca

SEQ ID NO: 667 - RNA, 21 nt, Artificial Sequence
  SARM1 targeting guide sequence portion
accauugagaagaucauccgc

SEQ ID NO: 668 - RNA, 21 nt, Artificial Sequence
  SARM1 targeting guide sequence portion
acccaugggugcagcacccuc

SEQ ID NO: 669 - RNA, 21 nt, Artificial Sequence
  SARM1 targeting guide sequence portion
acccuccaaacuggugucaga

SEQ ID NO: 670 - RNA, 21 nt, Artificial Sequence
  SARM1 targeting guide sequence portion
acgaauaccaggaggccacca

SEQ ID NO: 671 - RNA, 21 nt, Artificial Sequence
  SARM1 targeting guide sequence portion
acucaucugcaggcucugaca

SEQ ID NO: 672 - RNA, 21 nt, Artificial Sequence
  SARM1 targeting guide sequence portion
acuggugucagagccugcaga

SEQ ID NO: 673 - RNA, 21 nt, Artificial Sequence
  SARM1 targeting guide sequence portion
agaagaucauccgcuuccugc

SEQ ID NO: 674 - RNA, 21 nt, Artificial Sequence
  SARM1 targeting guide sequence portion
agagccugcagaugagucccg

SEQ ID NO: 675 - RNA, 21 nt, Artificial Sequence
  SARM1 targeting guide sequence portion
agaucauccgcuuccugcagg

SEQ ID NO: 676 - RNA, 21 nt, Artificial Sequence
  SARM1 targeting guide sequence portion
agaugagucccgggaggagcg

SEQ ID NO: 677 - RNA, 21 nt, Artificial Sequence
  SARM1 targeting guide sequence portion
agcacccuccaaacugguguc

SEQ ID NO: 678 - RNA, 21 nt, Artificial Sequence
  SARM1 targeting guide sequence portion
agccugcagaugagucccggg

SEQ ID NO: 679 - RNA, 21 nt, Artificial Sequence
  SARM1 targeting guide sequence portion
agcggaugaucuucucaaugg

SEQ ID NO: 680 - RNA, 21 nt, Artificial Sequence
  SARM1 targeting guide sequence portion
agcggcccugcaggaagcgga

SEQ ID NO: 681 - RNA, 21 nt, Artificial Sequence
  SARM1 targeting guide sequence portion
aggaagcggaugaucuucuca

SEQ ID NO: 682 - RNA, 21 nt, Artificial Sequence
  SARM1 targeting guide sequence portion
aggagcggcccugcaggaagc

SEQ ID NO: 683 - RNA, 21 nt, Artificial Sequence
  SARM1 targeting guide sequence portion
aggaggccaccauugagaaga

SEQ ID NO: 684 - RNA, 21 nt, Artificial Sequence
  SARM1 targeting guide sequence portion
aggccaccauugagaagauca

SEQ ID NO: 685 - RNA, 21 nt, Artificial Sequence
  SARM1 targeting guide sequence portion
aggcucugacaccaguuugga

SEQ ID NO: 686 - RNA, 21 nt, Artificial Sequence
  SARM1 targeting guide sequence portion
agggccgcuccucccgggacu

SEQ ID NO: 687 - RNA, 21 nt, Artificial Sequence
  SARM1 targeting guide sequence portion
agggugcugcacccauggguc

SEQ ID NO: 688 - RNA, 21 nt, Artificial Sequence
  SARM1 targeting guide sequence portion
agguggucccacgaauaccag

SEQ ID NO: 689 - RNA, 21 nt, Artificial Sequence
  SARM1 targeting guide sequence portion
agguuggacccaugggugcag

SEQ ID NO: 690 - RNA, 21 nt, Artificial Sequence
  SARM1 targeting guide sequence portion
agucccgggaggagcggcccu

SEQ ID NO: 691 - RNA, 21 nt, Artificial Sequence
  SARM1 targeting guide sequence portion
aguuuggagggugcugcaccc

SEQ ID NO: 692 - RNA, 21 nt, Artificial Sequence
  SARM1 targeting guide sequence portion
auaccaggaggccaccauuga

SEQ ID NO: 693 - RNA, 21 nt, Artificial Sequence
  SARM1 targeting guide sequence portion
aucauccgcuuccugcagggc

SEQ ID NO: 694 - RNA, 21 nt, Artificial Sequence
  SARM1 targeting guide sequence portion
auccgcuuccugcagggccgc

SEQ ID NO: 695 - RNA, 21 nt, Artificial Sequence
  SARM1 targeting guide sequence portion
aucugcaggcucugacaccag

SEQ ID NO: 696 - RNA, 21 nt, Artificial Sequence
  SARM1 targeting guide sequence portion
aucuucucaaugguggccucc

SEQ ID NO: 697 - RNA, 21 nt, Artificial Sequence
  SARM1 targeting guide sequence portion
augagucccgggaggagcggc

SEQ ID NO: 698 - RNA, 21 nt, Artificial Sequence
  SARM1 targeting guide sequence portion
augaucuucucaaugguggcc

SEQ ID NO: 699 - RNA, 21 nt, Artificial Sequence
  SARM1 targeting guide sequence portion
augggugcagcacccuccaaa

SEQ ID NO: 700 - RNA, 21 nt, Artificial Sequence
  SARM1 targeting guide sequence portion
augguggccuccugguauucg

SEQ ID NO: 701 - RNA, 21 nt, Artificial Sequence
  SARM1 targeting guide sequence portion
auugagaagaucauccgcuuc

SEQ ID NO: 702 - RNA, 21 nt, Artificial Sequence
  SARM1 targeting guide sequence portion
caaacuggugucagagccugc

SEQ ID NO: 703 - RNA, 21 nt, Artificial Sequence
  SARM1 targeting guide sequence portion
caaugguggccuccugguauu

SEQ ID NO: 704 - RNA, 21 nt, Artificial Sequence
  SARM1 targeting guide sequence portion
cacagguggucccacgaauac

SEQ ID NO: 705 - RNA, 21 nt, Artificial Sequence
  SARM1 targeting guide sequence portion
caccaguuuggagggugcugc

SEQ ID NO: 706 - RNA, 21 nt, Artificial Sequence
  SARM1 targeting guide sequence portion
caccauugagaagaucauccg

SEQ ID NO: 707 - RNA, 21 nt, Artificial Sequence
  SARM1 targeting guide sequence portion
cacccuccaaacuggugucag

SEQ ID NO: 708 - RNA, 21 nt, Artificial Sequence
  SARM1 targeting guide sequence portion
cacgaauaccaggaggccacc

SEQ ID NO: 709 - RNA, 21 nt, Artificial Sequence
  SARM1 targeting guide sequence portion
cagagccugcagaugaguccc

SEQ ID NO: 710 - RNA, 21 nt, Artificial Sequence
  SARM1 targeting guide sequence portion
cagaugagucccgggaggagc

SEQ ID NO: 711 - RNA, 21 nt, Artificial Sequence
  SARM1 targeting guide sequence portion
cagcacccuccaaacuggugu

SEQ ID NO: 712 - RNA, 21 nt, Artificial Sequence
  SARM1 targeting guide sequence portion
caggaagcggaugaucuucuc

SEQ ID NO: 713 - RNA, 21 nt, Artificial Sequence
  SARM1 targeting guide sequence portion
caggaggccaccauugagaag

SEQ ID NO: 714 - RNA, 21 nt, Artificial Sequence
  SARM1 targeting guide sequence portion
caggcucugacaccaguuugg

SEQ ID NO: 715 - RNA, 21 nt, Artificial Sequence
  SARM1 targeting guide sequence portion
cagggccgcuccucccgggac

SEQ ID NO: 716 - RNA, 21 nt, Artificial Sequence
  SARM1 targeting guide sequence portion
cagguggucccacgaauacca

SEQ ID NO: 717 - RNA, 21 nt, Artificial Sequence
  SARM1 targeting guide sequence portion
caguuuggagggugcugcacc

SEQ ID NO: 718 - RNA, 21 nt, Artificial Sequence
  SARM1 targeting guide sequence portion
cauccgcuuccugcagggccg

SEQ ID NO: 719 - RNA, 21 nt, Artificial Sequence
  SARM1 targeting guide sequence portion
caucugcaggcucugacacca

SEQ ID NO: 720 - RNA, 21 nt, Artificial Sequence
  SARM1 targeting guide sequence portion
caugggugcagcacccuccaa

SEQ ID NO: 721 - RNA, 21 nt, Artificial Sequence
  SARM1 targeting guide sequence portion
cauugagaagaucauccgcuu

SEQ ID NO: 722 - RNA, 21 nt, Artificial Sequence
  SARM1 targeting guide sequence portion
ccaaacuggugucagagccug

SEQ ID NO: 723 - RNA, 21 nt, Artificial Sequence
  SARM1 targeting guide sequence portion
ccacagguggucccacgaaua

SEQ ID NO: 724 - RNA, 21 nt, Artificial Sequence
  SARM1 targeting guide sequence portion
ccaccauugagaagaucaucc

SEQ ID NO: 725 - RNA, 21 nt, Artificial Sequence
  SARM1 targeting guide sequence portion
ccacgaauaccaggaggccac

SEQ ID NO: 726 - RNA, 21 nt, Artificial Sequence
  SARM1 targeting guide sequence portion
ccaggaggccaccauugagaa

SEQ ID NO: 727 - RNA, 21 nt, Artificial Sequence
  SARM1 targeting guide sequence portion
ccaguuuggagggugcugcac

SEQ ID NO: 728 - RNA, 21 nt, Artificial Sequence
  SARM1 targeting guide sequence portion
ccaugggugcagcacccucca

SEQ ID NO: 729 - RNA, 21 nt, Artificial Sequence
  SARM1 targeting guide sequence portion
ccauugagaagaucauccgcu

SEQ ID NO: 730 - RNA, 21 nt, Artificial Sequence
  SARM1 targeting guide sequence portion
cccacagguggucccacgaau

SEQ ID NO: 731 - RNA, 21 nt, Artificial Sequence
  SARM1 targeting guide sequence portion
cccacgaauaccaggaggcca

SEQ ID NO: 732 - RNA, 21 nt, Artificial Sequence
  SARM1 targeting guide sequence portion
cccaugggugcagcacccucc

SEQ ID NO: 733 - RNA, 21 nt, Artificial Sequence
  SARM1 targeting guide sequence portion
cccgggacucaucugcaggcu

SEQ ID NO: 734 - RNA, 21 nt, Artificial Sequence
  SARM1 targeting guide sequence portion
cccgggaggagcggcccugca

SEQ ID NO: 735 - RNA, 21 nt, Artificial Sequence
  SARM1 targeting guide sequence portion
cccuccaaacuggugucagag

SEQ ID NO: 736 - RNA, 21 nt, Artificial Sequence
  SARM1 targeting guide sequence portion
cccugcaggaagcggaugauc

SEQ ID NO: 737 - RNA, 21 nt, Artificial Sequence
  SARM1 targeting guide sequence portion
ccgcuccucccgggacucauc

SEQ ID NO: 738 - RNA, 21 nt, Artificial Sequence
  SARM1 targeting guide sequence portion
ccgcuuccugcagggccgcuc

SEQ ID NO: 739 - RNA, 21 nt, Artificial Sequence
  SARM1 targeting guide sequence portion
ccgggacucaucugcaggcuc

SEQ ID NO: 740 - RNA, 21 nt, Artificial Sequence
  SARM1 targeting guide sequence portion
ccgggaggagcggcccugcag

SEQ ID NO: 741 - RNA, 21 nt, Artificial Sequence
  SARM1 targeting guide sequence portion
ccuccaaacuggugucagagc

SEQ ID NO: 742 - RNA, 21 nt, Artificial Sequence
  SARM1 targeting guide sequence portion
ccucccgggacucaucugcag

SEQ ID NO: 743 - RNA, 21 nt, Artificial Sequence
  SARM1 targeting guide sequence portion
ccuccugguauucgugggacc

SEQ ID NO: 744 - RNA, 21 nt, Artificial Sequence
  SARM1 targeting guide sequence portion
ccugcagaugagucccgggag

SEQ ID NO: 745 - RNA, 21 nt, Artificial Sequence
  SARM1 targeting guide sequence portion
ccugcaggaagcggaugaucu

SEQ ID NO: 746 - RNA, 21 nt, Artificial Sequence
  SARM1 targeting guide sequence portion
ccugcagggccgcuccucccg

SEQ ID NO: 747 - RNA, 21 nt, Artificial Sequence
  SARM1 targeting guide sequence portion
ccugguauucgugggaccacc

SEQ ID NO: 748 - RNA, 21 nt, Artificial Sequence
  SARM1 targeting guide sequence portion
cgaauaccaggaggccaccau

SEQ ID NO: 749 - RNA, 21 nt, Artificial Sequence
  SARM1 targeting guide sequence portion
cgcuccucccgggacucaucu

SEQ ID NO: 750 - RNA, 21 nt, Artificial Sequence
  SARM1 targeting guide sequence portion
cgcuuccugcagggccgcucc

SEQ ID NO: 751 - RNA, 21 nt, Artificial Sequence
  SARM1 targeting guide sequence portion
cggaugaucuucucaauggug

SEQ ID NO: 752 - RNA, 21 nt, Artificial Sequence
  SARM1 targeting guide sequence portion
cggcccugcaggaagcggaug

SEQ ID NO: 753 - RNA, 21 nt, Artificial Sequence
  SARM1 targeting guide sequence portion
cgggacucaucugcaggcucu

SEQ ID NO: 754 - RNA, 21 nt, Artificial Sequence
  SARM1 targeting guide sequence portion
cgggaggagcggcccugcagg

SEQ ID NO: 755 - RNA, 21 nt, Artificial Sequence
  SARM1 targeting guide sequence portion
cucaaugguggccuccuggua

SEQ ID NO: 756 - RNA, 21 nt, Artificial Sequence
  SARM1 targeting guide sequence portion
cucaucugcaggcucugacac

SEQ ID NO: 757 - RNA, 21 nt, Artificial Sequence
  SARM1 targeting guide sequence portion
cuccaaacuggugucagagcc

SEQ ID NO: 758 - RNA, 21 nt, Artificial Sequence
  SARM1 targeting guide sequence portion
cucccgggacucaucugcagg

SEQ ID NO: 759 - RNA, 21 nt, Artificial Sequence
  SARM1 targeting guide sequence portion
cuccucccgggacucaucugc

SEQ ID NO: 760 - RNA, 21 nt, Artificial Sequence
  SARM1 targeting guide sequence portion
cuccugguauucgugggacca

SEQ ID NO: 761 - RNA, 21 nt, Artificial Sequence
  SARM1 targeting guide sequence portion
cucugacaccaguuuggaggg

SEQ ID NO: 762 - RNA, 21 nt, Artificial Sequence
  SARM1 targeting guide sequence portion
cugacaccaguuuggagggug

SEQ ID NO: 763 - RNA, 21 nt, Artificial Sequence
  SARM1 targeting guide sequence portion
cugcagaugagucccgggagg

SEQ ID NO: 764 - RNA, 21 nt, Artificial Sequence
  SARM1 targeting guide sequence portion
cugcaggaagcggaugaucuu

SEQ ID NO: 765 - RNA, 21 nt, Artificial Sequence
  SARM1 targeting guide sequence portion
cugcaggcucugacaccaguu

SEQ ID NO: 766 - RNA, 21 nt, Artificial Sequence
  SARM1 targeting guide sequence portion
cugcagggccgcuccucccgg

SEQ ID NO: 767 - RNA, 21 nt, Artificial Sequence
  SARM1 targeting guide sequence portion
cuggugucagagccugcagau

SEQ ID NO: 768 - RNA, 21 nt, Artificial Sequence
  SARM1 targeting guide sequence portion
cuuccugcagggccgcuccuc

SEQ ID NO: 769 - RNA, 21 nt, Artificial Sequence
  SARM1 targeting guide sequence portion
cuucucaaugguggccuccug

SEQ ID NO: 770 - RNA, 21 nt, Artificial Sequence
  SARM1 targeting guide sequence portion
gaagaucauccgcuuccugca

SEQ ID NO: 771 - RNA, 21 nt, Artificial Sequence
  SARM1 targeting guide sequence portion
gaagcggaugaucuucucaau

SEQ ID NO: 772 - RNA, 21 nt, Artificial Sequence
  SARM1 targeting guide sequence portion
gaauaccaggaggccaccauu

SEQ ID NO: 773 - RNA, 21 nt, Artificial Sequence
  SARM1 targeting guide sequence portion
gacaccaguuuggagggugcu

SEQ ID NO: 774 - RNA, 21 nt, Artificial Sequence
  SARM1 targeting guide sequence portion
gacccaugggugcagcacccu

SEQ ID NO: 775 - RNA, 21 nt, Artificial Sequence
  SARM1 targeting guide sequence portion
gacucaucugcaggcucugac

SEQ ID NO: 776 - RNA, 21 nt, Artificial Sequence
  SARM1 targeting guide sequence portion
gagaagaucauccgcuuccug

SEQ ID NO: 777 - RNA, 21 nt, Artificial Sequence
  SARM1 targeting guide sequence portion
gagccugcagaugagucccgg

SEQ ID NO: 778 - RNA, 21 nt, Artificial Sequence
  SARM1 targeting guide sequence portion
gagcggcccugcaggaagcgg

SEQ ID NO: 779 - RNA, 21 nt, Artificial Sequence
  SARM1 targeting guide sequence portion
gaggagcggcccugcaggaag

SEQ ID NO: 780 - RNA, 21 nt, Artificial Sequence
  SARM1 targeting guide sequence portion
gaggccaccauugagaagauc

SEQ ID NO: 781 - RNA, 21 nt, Artificial Sequence
  SARM1 targeting guide sequence portion
gagggugcugcacccaugggu

SEQ ID NO: 782 - RNA, 21 nt, Artificial Sequence
  SARM1 targeting guide sequence portion
gagucccgggaggagcggccc

SEQ ID NO: 783 - RNA, 21 nt, Artificial Sequence
  SARM1 targeting guide sequence portion
gaucauccgcuuccugcaggg

SEQ ID NO: 784 - RNA, 21 nt, Artificial Sequence
  SARM1 targeting guide sequence portion
gaucuucucaaugguggccuc

SEQ ID NO: 785 - RNA, 21 nt, Artificial Sequence
  SARM1 targeting guide sequence portion
gaugagucccgggaggagcgg

SEQ ID NO: 786 - RNA, 21 nt, Artificial Sequence
  SARM1 targeting guide sequence portion
gaugaucuucucaaugguggc

SEQ ID NO: 787 - RNA, 21 nt, Artificial Sequence
  SARM1 targeting guide sequence portion
gcacccuccaaacugguguca

SEQ ID NO: 788 - RNA, 21 nt, Artificial Sequence
  SARM1 targeting guide sequence portion
gcagaugagucccgggaggag

SEQ ID NO: 789 - RNA, 21 nt, Artificial Sequence
  SARM1 targeting guide sequence portion
gcagcacccuccaaacuggug

SEQ ID NO: 790 - RNA, 21 nt, Artificial Sequence
  SARM1 targeting guide sequence portion
gcaggaagcggaugaucuucu

SEQ ID NO: 791 - RNA, 21 nt, Artificial Sequence
  SARM1 targeting guide sequence portion
gcaggcucugacaccaguuug

SEQ ID NO: 792 - RNA, 21 nt, Artificial Sequence
  SARM1 targeting guide sequence portion
gcagggccgcuccucccggga

SEQ ID NO: 793 - RNA, 21 nt, Artificial Sequence
  SARM1 targeting guide sequence portion
gccaccauugagaagaucauc

SEQ ID NO: 794 - RNA, 21 nt, Artificial Sequence
  SARM1 targeting guide sequence portion
gcccugcaggaagcggaugau

SEQ ID NO: 795 - RNA, 21 nt, Artificial Sequence
  SARM1 targeting guide sequence portion
gccgcuccucccgggacucau

SEQ ID NO: 796 - RNA, 21 nt, Artificial Sequence
  SARM1 targeting guide sequence portion
gccuccugguauucgugggac

SEQ ID NO: 797 - RNA, 21 nt, Artificial Sequence
  SARM1 targeting guide sequence portion
gccugcagaugagucccggga

SEQ ID NO: 798 - RNA, 21 nt, Artificial Sequence
  SARM1 targeting guide sequence portion
gcggaugaucuucucaauggu

SEQ ID NO: 799 - RNA, 21 nt, Artificial Sequence
  SARM1 targeting guide sequence portion
gcggcccugcaggaagcggau

SEQ ID NO: 800 - RNA, 21 nt, Artificial Sequence
  SARM1 targeting guide sequence portion
gcuccucccgggacucaucug

SEQ ID NO: 801 - RNA, 21 nt, Artificial Sequence
  SARM1 targeting guide sequence portion
gcucugacaccaguuuggagg

SEQ ID NO: 802 - RNA, 21 nt, Artificial Sequence
  SARM1 targeting guide sequence portion
gcuuccugcagggccgcuccu

SEQ ID NO: 803 - RNA, 21 nt, Artificial Sequence
  SARM1 targeting guide sequence portion
ggaagcggaugaucuucucaa

SEQ ID NO: 804 - RNA, 21 nt, Artificial Sequence
  SARM1 targeting guide sequence portion
ggacccaugggugcagcaccc

SEQ ID NO: 805 - RNA, 21 nt, Artificial Sequence
  SARM1 targeting guide sequence portion
ggacucaucugcaggcucuga

SEQ ID NO: 806 - RNA, 21 nt, Artificial Sequence
  SARM1 targeting guide sequence portion
ggagcggcccugcaggaagcg

SEQ ID NO: 807 - RNA, 21 nt, Artificial Sequence
  SARM1 targeting guide sequence portion
ggaggagcggcccugcaggaa

SEQ ID NO: 808 - RNA, 21 nt, Artificial Sequence
  SARM1 targeting guide sequence portion
ggaggccaccauugagaagau

SEQ ID NO: 809 - RNA, 21 nt, Artificial Sequence
  SARM1 targeting guide sequence portion
ggagggugcugcacccauggg

SEQ ID NO: 810 - RNA, 21 nt, Artificial Sequence
  SARM1 targeting guide sequence portion
ggaugaucuucucaauggugg

SEQ ID NO: 811 - RNA, 21 nt, Artificial Sequence
  SARM1 targeting guide sequence portion
ggccaccauugagaagaucau

SEQ ID NO: 812 - RNA, 21 nt, Artificial Sequence
  SARM1 targeting guide sequence portion
ggcccugcaggaagcggauga

SEQ ID NO: 813 - RNA, 21 nt, Artificial Sequence
  SARM1 targeting guide sequence portion
ggccgcuccucccgggacuca

SEQ ID NO: 814 - RNA, 21 nt, Artificial Sequence
  SARM1 targeting guide sequence portion
ggccuccugguauucguggga

SEQ ID NO: 815 - RNA, 21 nt, Artificial Sequence
  SARM1 targeting guide sequence portion
ggcucugacaccaguuuggag

SEQ ID NO: 816 - RNA, 21 nt, Artificial Sequence
  SARM1 targeting guide sequence portion
gggacucaucugcaggcucug

SEQ ID NO: 817 - RNA, 21 nt, Artificial Sequence
  SARM1 targeting guide sequence portion
gggaggagcggcccugcagga

SEQ ID NO: 818 - RNA, 21 nt, Artificial Sequence
  SARM1 targeting guide sequence portion
gggccgcuccucccgggacuc

SEQ ID NO: 819 - RNA, 21 nt, Artificial Sequence
  SARM1 targeting guide sequence portion
gggugcagcacccuccaaacu

SEQ ID NO: 820 - RNA, 21 nt, Artificial Sequence
  SARM1 targeting guide sequence portion
gggugcugcacccaugggucc

SEQ ID NO: 821 - RNA, 21 nt, Artificial Sequence
  SARM1 targeting guide sequence portion
ggucccacgaauaccaggagg

SEQ ID NO: 822 - RNA, 21 nt, Artificial Sequence
  SARM1 targeting guide sequence portion
ggugcagcacccuccaaacug

SEQ ID NO: 823 - RNA, 21 nt, Artificial Sequence
  SARM1 targeting guide sequence portion
ggugcugcacccaugggucca

SEQ ID NO: 824 - RNA, 21 nt, Artificial Sequence
  SARM1 targeting guide sequence portion
gguggccuccugguauucgug

SEQ ID NO: 825 - RNA, 21 nt, Artificial Sequence
  SARM1 targeting guide sequence portion
gguggucccacgaauaccagg

SEQ ID NO: 826 - RNA, 21 nt, Artificial Sequence
  SARM1 targeting guide sequence portion
ggugucagagccugcagauga

SEQ ID NO: 827 - RNA, 21 nt, Artificial Sequence
  SARM1 targeting guide sequence portion
gguuggacccaugggugcagc

SEQ ID NO: 828 - RNA, 21 nt, Artificial Sequence
  SARM1 targeting guide sequence portion
gucagagccugcagaugaguc

SEQ ID NO: 829 - RNA, 21 nt, Artificial Sequence
  SARM1 targeting guide sequence portion
gucccacgaauaccaggaggc

SEQ ID NO: 830 - RNA, 21 nt, Artificial Sequence
  SARM1 targeting guide sequence portion
gucccgggaggagcggcccug

SEQ ID NO: 831 - RNA, 21 nt, Artificial Sequence
  SARM1 targeting guide sequence portion
gugcagcacccuccaaacugg

SEQ ID NO: 832 - RNA, 21 nt, Artificial Sequence
  SARM1 targeting guide sequence portion
guggccuccugguauucgugg

SEQ ID NO: 833 - RNA, 21 nt, Artificial Sequence
  SARM1 targeting guide sequence portion
guggucccacgaauaccagga

SEQ ID NO: 834 - RNA, 21 nt, Artificial Sequence
  SARM1 targeting guide sequence portion
gugucagagccugcagaugag

SEQ ID NO: 835 - RNA, 21 nt, Artificial Sequence
  SARM1 targeting guide sequence portion
guuggacccaugggugcagca

SEQ ID NO: 836 - RNA, 21 nt, Artificial Sequence
  SARM1 targeting guide sequence portion
guuuggagggugcugcaccca

SEQ ID NO: 837 - RNA, 21 nt, Artificial Sequence
  SARM1 targeting guide sequence portion
uaccaggaggccaccauugag

SEQ ID NO: 838 - RNA, 21 nt, Artificial Sequence
  SARM1 targeting guide sequence portion
uagguuggacccaugggugca

SEQ ID NO: 839 - RNA, 21 nt, Artificial Sequence
  SARM1 targeting guide sequence portion
ucaaugguggccuccugguau

SEQ ID NO: 840 - RNA, 21 nt, Artificial Sequence
  SARM1 targeting guide sequence portion
ucagagccugcagaugagucc

SEQ ID NO: 841 - RNA, 21 nt, Artificial Sequence
  SARM1 targeting guide sequence portion
ucauccgcuuccugcagggcc

SEQ ID NO: 842 - RNA, 21 nt, Artificial Sequence
  SARM1 targeting guide sequence portion
ucaucugcaggcucugacacc

SEQ ID NO: 843 - RNA, 21 nt, Artificial Sequence
  SARM1 targeting guide sequence portion
uccaaacuggugucagagccu

SEQ ID NO: 844 - RNA, 21 nt, Artificial Sequence
  SARM1 targeting guide sequence portion
ucccacgaauaccaggaggcc

SEQ ID NO: 845 - RNA, 21 nt, Artificial Sequence
  SARM1 targeting guide sequence portion
ucccgggacucaucugcaggc

SEQ ID NO: 846 - RNA, 21 nt, Artificial Sequence
  SARM1 targeting guide sequence portion
ucccgggaggagcggcccugc

SEQ ID NO: 847 - RNA, 21 nt, Artificial Sequence
  SARM1 targeting guide sequence portion
uccgcuuccugcagggccgcu

SEQ ID NO: 848 - RNA, 21 nt, Artificial Sequence
  SARM1 targeting guide sequence portion
uccucccgggacucaucugca

SEQ ID NO: 849 - RNA, 21 nt, Artificial Sequence
  SARM1 targeting guide sequence portion
uccugcagggccgcuccuccc

SEQ ID NO: 850 - RNA, 21 nt, Artificial Sequence
  SARM1 targeting guide sequence portion
uccugguauucgugggaccac

SEQ ID NO: 851 - RNA, 21 nt, Artificial Sequence
  SARM1 targeting guide sequence portion
ucucaaugguggccuccuggu

SEQ ID NO: 852 - RNA, 21 nt, Artificial Sequence
  SARM1 targeting guide sequence portion
ucugacaccaguuuggagggu

SEQ ID NO: 853 - RNA, 21 nt, Artificial Sequence
  SARM1 targeting guide sequence portion
ucugcaggcucugacaccagu

SEQ ID NO: 854 - RNA, 21 nt, Artificial Sequence
  SARM1 targeting guide sequence portion
ucuucucaaugguggccuccu

SEQ ID NO: 855 - RNA, 21 nt, Artificial Sequence
  SARM1 targeting guide sequence portion
ugacaccaguuuggagggugc

SEQ ID NO: 856 - RNA, 21 nt, Artificial Sequence
  SARM1 targeting guide sequence portion
ugagaagaucauccgcuuccu

SEQ ID NO: 857 - RNA, 21 nt, Artificial Sequence
  SARM1 targeting guide sequence portion
ugagucccgggaggagcggcc

SEQ ID NO: 858 - RNA, 21 nt, Artificial Sequence
  SARM1 targeting guide sequence portion
ugaucuucucaaugguggccu

SEQ ID NO: 859 - RNA, 21 nt, Artificial Sequence
  SARM1 targeting guide sequence portion
ugcagaugagucccgggagga

SEQ ID NO: 860 - RNA, 21 nt, Artificial Sequence
  SARM1 targeting guide sequence portion
ugcagcacccuccaaacuggu

SEQ ID NO: 861 - RNA, 21 nt, Artificial Sequence
  SARM1 targeting guide sequence portion
ugcaggaagcggaugaucuuc

SEQ ID NO: 862 - RNA, 21 nt, Artificial Sequence
  SARM1 targeting guide sequence portion
ugcaggcucugacaccaguuu

SEQ ID NO: 863 - RNA, 21 nt, Artificial Sequence
  SARM1 targeting guide sequence portion
ugcagggccgcuccucccggg

SEQ ID NO: 864 - RNA, 21 nt, Artificial Sequence
  SARM1 targeting guide sequence portion
uggacccaugggugcagcacc

SEQ ID NO: 865 - RNA, 21 nt, Artificial Sequence
  SARM1 targeting guide sequence portion
uggagggugcugcacccaugg

SEQ ID NO: 866 - RNA, 21 nt, Artificial Sequence
  SARM1 targeting guide sequence portion
uggccuccugguauucguggg

SEQ ID NO: 867 - RNA, 21 nt, Artificial Sequence
  SARM1 targeting guide sequence portion
ugggugcagcacccuccaaac

SEQ ID NO: 868 - RNA, 21 nt, Artificial Sequence
  SARM1 targeting guide sequence portion
uggucccacgaauaccaggag

SEQ ID NO: 869 - RNA, 21 nt, Artificial Sequence
  SARM1 targeting guide sequence portion
ugguggccuccugguauucgu

SEQ ID NO: 870 - RNA, 21 nt, Artificial Sequence
  SARM1 targeting guide sequence portion
uggugucagagccugcagaug

SEQ ID NO: 871 - RNA, 21 nt, Artificial Sequence
  SARM1 targeting guide sequence portion
ugucagagccugcagaugagu

SEQ ID NO: 872 - RNA, 21 nt, Artificial Sequence
  SARM1 targeting guide sequence portion
uuagguuggacccaugggugc

SEQ ID NO: 873 - RNA, 21 nt, Artificial Sequence
  SARM1 targeting guide sequence portion
uuccugcagggccgcuccucc

SEQ ID NO: 874 - RNA, 21 nt, Artificial Sequence
  SARM1 targeting guide sequence portion
uucucaaugguggccuccugg

SEQ ID NO: 875 - RNA, 21 nt, Artificial Sequence
  SARM1 targeting guide sequence portion
uugagaagaucauccgcuucc

SEQ ID NO: 876 - RNA, 21 nt, Artificial Sequence
  SARM1 targeting guide sequence portion
uuggacccaugggugcagcac

SEQ ID NO: 877 - RNA, 21 nt, Artificial Sequence
  SARM1 targeting guide sequence portion
uuggagggugcugcacccaug

SEQ ID NO: 878 - RNA, 21 nt, Artificial Sequence
  SARM1 targeting guide sequence portion
uuuggagggugcugcacccau

SEQ ID NO: 879 - RNA, 22 nt, Artificial Sequence
  SARM1 targeting guide sequence portion
aaacuggugucagagccugcag

SEQ ID NO: 880 - RNA, 22 nt, Artificial Sequence
  SARM1 targeting guide sequence portion
aacuggugucagagccugcaga

SEQ ID NO: 881 - RNA, 22 nt, Artificial Sequence
  SARM1 targeting guide sequence portion
aagaucauccgcuuccugcagg

SEQ ID NO: 882 - RNA, 22 nt, Artificial Sequence
  SARM1 targeting guide sequence portion
aagcggaugaucuucucaaugg

SEQ ID NO: 883 - RNA, 22 nt, Artificial Sequence
  SARM1 targeting guide sequence portion
aauaccaggaggccaccauuga

SEQ ID NO: 884 - RNA, 22 nt, Artificial Sequence
  SARM1 targeting guide sequence portion
aaugguggccuccugguauucg

SEQ ID NO: 885 - RNA, 22 nt, Artificial Sequence
  SARM1 targeting guide sequence portion
acaccaguuuggagggugcugc

SEQ ID NO: 886 - RNA, 22 nt, Artificial Sequence
  SARM1 targeting guide sequence portion
acagguggucccacgaauacca

SEQ ID NO: 887 - RNA, 22 nt, Artificial Sequence
  SARM1 targeting guide sequence portion
accaggaggccaccauugagaa

SEQ ID NO: 888 - RNA, 22 nt, Artificial Sequence
  SARM1 targeting guide sequence portion
accaguuuggagggugcugcac

SEQ ID NO: 889 - RNA, 22 nt, Artificial Sequence
  SARM1 targeting guide sequence portion
accauugagaagaucauccgcu

SEQ ID NO: 890 - RNA, 22 nt, Artificial Sequence
  SARM1 targeting guide sequence portion
acccaugggugcagcacccucc

SEQ ID NO: 891 - RNA, 22 nt, Artificial Sequence
  SARM1 targeting guide sequence portion
acccuccaaacuggugucagag

SEQ ID NO: 892 - RNA, 22 nt, Artificial Sequence
  SARM1 targeting guide sequence portion
acgaauaccaggaggccaccau

SEQ ID NO: 893 - RNA, 22 nt, Artificial Sequence
  SARM1 targeting guide sequence portion
acucaucugcaggcucugacac

SEQ ID NO: 894 - RNA, 22 nt, Artificial Sequence
  SARM1 targeting guide sequence portion
acuggugucagagccugcagau

SEQ ID NO: 895 - RNA, 22 nt, Artificial Sequence
  SARM1 targeting guide sequence portion
agaagaucauccgcuuccugca

SEQ ID NO: 896 - RNA, 22 nt, Artificial Sequence
  SARM1 targeting guide sequence portion
agagccugcagaugagucccgg

SEQ ID NO: 897 - RNA, 22 nt, Artificial Sequence
  SARM1 targeting guide sequence portion
agaucauccgcuuccugcaggg

SEQ ID NO: 898 - RNA, 22 nt, Artificial Sequence
  SARM1 targeting guide sequence portion
agaugagucccgggaggagcgg

SEQ ID NO: 899 - RNA, 22 nt, Artificial Sequence
  SARM1 targeting guide sequence portion
agcacccuccaaacugguguca

SEQ ID NO: 900 - RNA, 22 nt, Artificial Sequence
  SARM1 targeting guide sequence portion
agccugcagaugagucccggga

SEQ ID NO: 901 - RNA, 22 nt, Artificial Sequence
  SARM1 targeting guide sequence portion
agcggaugaucuucucaauggu

SEQ ID NO: 902 - RNA, 22 nt, Artificial Sequence
  SARM1 targeting guide sequence portion
agcggcccugcaggaagcggau

SEQ ID NO: 903 - RNA, 22 nt, Artificial Sequence
  SARM1 targeting guide sequence portion
aggaagcggaugaucuucucaa

SEQ ID NO: 904 - RNA, 22 nt, Artificial Sequence
  SARM1 targeting guide sequence portion
aggagcggcccugcaggaagcg

SEQ ID NO: 905 - RNA, 22 nt, Artificial Sequence
  SARM1 targeting guide sequence portion
aggaggccaccauugagaagau

SEQ ID NO: 906 - RNA, 22 nt, Artificial Sequence
  SARM1 targeting guide sequence portion
aggccaccauugagaagaucau

SEQ ID NO: 907 - RNA, 22 nt, Artificial Sequence
  SARM1 targeting guide sequence portion
aggcucugacaccaguuuggag

SEQ ID NO: 908 - RNA, 22 nt, Artificial Sequence
  SARM1 targeting guide sequence portion
agggccgcuccucccgggacuc

SEQ ID NO: 909 - RNA, 22 nt, Artificial Sequence
  SARM1 targeting guide sequence portion
agggugcugcacccaugggucc

SEQ ID NO: 910 - RNA, 22 nt, Artificial Sequence
  SARM1 targeting guide sequence portion
agguggucccacgaauaccagg

SEQ ID NO: 911 - RNA, 22 nt, Artificial Sequence
  SARM1 targeting guide sequence portion
agguuggacccaugggugcagc

SEQ ID NO: 912 - RNA, 22 nt, Artificial Sequence
  SARM1 targeting guide sequence portion
agucccgggaggagcggcccug

SEQ ID NO: 913 - RNA, 22 nt, Artificial Sequence
  SARM1 targeting guide sequence portion
aguuuggagggugcugcaccca

SEQ ID NO: 914 - RNA, 22 nt, Artificial Sequence
  SARM1 targeting guide sequence portion
auaccaggaggccaccauugag

SEQ ID NO: 915 - RNA, 22 nt, Artificial Sequence
  SARM1 targeting guide sequence portion
aucauccgcuuccugcagggcc

SEQ ID NO: 916 - RNA, 22 nt, Artificial Sequence
  SARM1 targeting guide sequence portion
auccgcuuccugcagggccgcu

SEQ ID NO: 917 - RNA, 22 nt, Artificial Sequence
  SARM1 targeting guide sequence portion
aucugcaggcucugacaccagu

SEQ ID NO: 918 - RNA, 22 nt, Artificial Sequence
  SARM1 targeting guide sequence portion
aucuucucaaugguggccuccu

SEQ ID NO: 919 - RNA, 22 nt, Artificial Sequence
  SARM1 targeting guide sequence portion
augagucccgggaggagcggcc

SEQ ID NO: 920 - RNA, 22 nt, Artificial Sequence
  SARM1 targeting guide sequence portion
augaucuucucaaugguggccu

SEQ ID NO: 921 - RNA, 22 nt, Artificial Sequence
  SARM1 targeting guide sequence portion
augggugcagcacccuccaaac

SEQ ID NO: 922 - RNA, 22 nt, Artificial Sequence
  SARM1 targeting guide sequence portion
augguggccuccugguauucgu

SEQ ID NO: 923 - RNA, 22 nt, Artificial Sequence
  SARM1 targeting guide sequence portion
auugagaagaucauccgcuucc

SEQ ID NO: 924 - RNA, 22 nt, Artificial Sequence
  SARM1 targeting guide sequence portion
caaacuggugucagagccugca

SEQ ID NO: 925 - RNA, 22 nt, Artificial Sequence
  SARM1 targeting guide sequence portion
caaugguggccuccugguauuc

SEQ ID NO: 926 - RNA, 22 nt, Artificial Sequence
  SARM1 targeting guide sequence portion
cacagguggucccacgaauacc

SEQ ID NO: 927 - RNA, 22 nt, Artificial Sequence
  SARM1 targeting guide sequence portion
caccaguuuggagggugcugca

SEQ ID NO: 928 - RNA, 22 nt, Artificial Sequence
  SARM1 targeting guide sequence portion
caccauugagaagaucauccgc

SEQ ID NO: 929 - RNA, 22 nt, Artificial Sequence
  SARM1 targeting guide sequence portion
cacccuccaaacuggugucaga

SEQ ID NO: 930 - RNA, 22 nt, Artificial Sequence
  SARM1 targeting guide sequence portion
cacgaauaccaggaggccacca

SEQ ID NO: 931 - RNA, 22 nt, Artificial Sequence
  SARM1 targeting guide sequence portion
cagagccugcagaugagucccg

SEQ ID NO: 932 - RNA, 22 nt, Artificial Sequence
  SARM1 targeting guide sequence portion
cagaugagucccgggaggagcg

SEQ ID NO: 933 - RNA, 22 nt, Artificial Sequence
  SARM1 targeting guide sequence portion
cagcacccuccaaacugguguc

SEQ ID NO: 934 - RNA, 22 nt, Artificial Sequence
  SARM1 targeting guide sequence portion
caggaagcggaugaucuucuca

SEQ ID NO: 935 - RNA, 22 nt, Artificial Sequence
  SARM1 targeting guide sequence portion
caggaggccaccauugagaaga

SEQ ID NO: 936 - RNA, 22 nt, Artificial Sequence
  SARM1 targeting guide sequence portion
caggcucugacaccaguuugga

SEQ ID NO: 937 - RNA, 22 nt, Artificial Sequence
  SARM1 targeting guide sequence portion
cagggccgcuccucccgggacu

SEQ ID NO: 938 - RNA, 22 nt, Artificial Sequence
  SARM1 targeting guide sequence portion
cagguggucccacgaauaccag

SEQ ID NO: 939 - RNA, 22 nt, Artificial Sequence
  SARM1 targeting guide sequence portion
caguuuggagggugcugcaccc

SEQ ID NO: 940 - RNA, 22 nt, Artificial Sequence
  SARM1 targeting guide sequence portion
cauccgcuuccugcagggccgc

SEQ ID NO: 941 - RNA, 22 nt, Artificial Sequence
  SARM1 targeting guide sequence portion
caucugcaggcucugacaccag

SEQ ID NO: 942 - RNA, 22 nt, Artificial Sequence
  SARM1 targeting guide sequence portion
caugggugcagcacccuccaaa

SEQ ID NO: 943 - RNA, 22 nt, Artificial Sequence
  SARM1 targeting guide sequence portion
cauugagaagaucauccgcuuc

SEQ ID NO: 944 - RNA, 22 nt, Artificial Sequence
  SARM1 targeting guide sequence portion
ccaaacuggugucagagccugc

SEQ ID NO: 945 - RNA, 22 nt, Artificial Sequence
  SARM1 targeting guide sequence portion
ccacagguggucccacgaauac

SEQ ID NO: 946 - RNA, 22 nt, Artificial Sequence
  SARM1 targeting guide sequence portion
ccaccauugagaagaucauccg

SEQ ID NO: 947 - RNA, 22 nt, Artificial Sequence
  SARM1 targeting guide sequence portion
ccacgaauaccaggaggccacc

SEQ ID NO: 948 - RNA, 22 nt, Artificial Sequence
  SARM1 targeting guide sequence portion
ccaggaggccaccauugagaag

SEQ ID NO: 949 - RNA, 22 nt, Artificial Sequence
  SARM1 targeting guide sequence portion
ccaguuuggagggugcugcacc

SEQ ID NO: 950 - RNA, 22 nt, Artificial Sequence
  SARM1 targeting guide sequence portion
ccaugggugcagcacccuccaa

SEQ ID NO: 951 - RNA, 22 nt, Artificial Sequence
  SARM1 targeting guide sequence portion
ccauugagaagaucauccgcuu

SEQ ID NO: 952 - RNA, 22 nt, Artificial Sequence
  SARM1 targeting guide sequence portion
cccacagguggucccacgaaua

SEQ ID NO: 953 - RNA, 22 nt, Artificial Sequence
  SARM1 targeting guide sequence portion
cccacgaauaccaggaggccac

SEQ ID NO: 954 - RNA, 22 nt, Artificial Sequence
  SARM1 targeting guide sequence portion
cccaugggugcagcacccucca

SEQ ID NO: 955 - RNA, 22 nt, Artificial Sequence
  SARM1 targeting guide sequence portion
cccgggacucaucugcaggcuc

SEQ ID NO: 956 - RNA, 22 nt, Artificial Sequence
  SARM1 targeting guide sequence portion
cccgggaggagcggcccugcag

SEQ ID NO: 957 - RNA, 22 nt, Artificial Sequence
  SARM1 targeting guide sequence portion
cccuccaaacuggugucagagc

SEQ ID NO: 958 - RNA, 22 nt, Artificial Sequence
  SARM1 targeting guide sequence portion
cccugcaggaagcggaugaucu

SEQ ID NO: 959 - RNA, 22 nt, Artificial Sequence
  SARM1 targeting guide sequence portion
ccgcuccucccgggacucaucu

SEQ ID NO: 960 - RNA, 22 nt, Artificial Sequence
  SARM1 targeting guide sequence portion
ccgcuuccugcagggccgcucc

SEQ ID NO: 961 - RNA, 22 nt, Artificial Sequence
  SARM1 targeting guide sequence portion
ccgggacucaucugcaggcucu

SEQ ID NO: 962 - RNA, 22 nt, Artificial Sequence
  SARM1 targeting guide sequence portion
ccgggaggagcggcccugcagg

SEQ ID NO: 963 - RNA, 22 nt, Artificial Sequence
  SARM1 targeting guide sequence portion
ccuccaaacuggugucagagcc

SEQ ID NO: 964 - RNA, 22 nt, Artificial Sequence
  SARM1 targeting guide sequence portion
ccucccgggacucaucugcagg

SEQ ID NO: 965 - RNA, 22 nt, Artificial Sequence
  SARM1 targeting guide sequence portion
ccuccugguauucgugggacca

SEQ ID NO: 966 - RNA, 22 nt, Artificial Sequence
  SARM1 targeting guide sequence portion
ccugcagaugagucccgggagg

SEQ ID NO: 967 - RNA, 22 nt, Artificial Sequence
  SARM1 targeting guide sequence portion
ccugcaggaagcggaugaucuu

SEQ ID NO: 968 - RNA, 22 nt, Artificial Sequence
  SARM1 targeting guide sequence portion
ccugcagggccgcuccucccgg

SEQ ID NO: 969 - RNA, 22 nt, Artificial Sequence
  SARM1 targeting guide sequence portion
cgaauaccaggaggccaccauu

SEQ ID NO: 970 - RNA, 22 nt, Artificial Sequence
  SARM1 targeting guide sequence portion
cgcuccucccgggacucaucug

SEQ ID NO: 971 - RNA, 22 nt, Artificial Sequence
  SARM1 targeting guide sequence portion
cgcuuccugcagggccgcuccu

SEQ ID NO: 972 - RNA, 22 nt, Artificial Sequence
  SARM1 targeting guide sequence portion
cggaugaucuucucaauggugg

SEQ ID NO: 973 - RNA, 22 nt, Artificial Sequence
  SARM1 targeting guide sequence portion
cggcccugcaggaagcggauga

SEQ ID NO: 974 - RNA, 22 nt, Artificial Sequence
  SARM1 targeting guide sequence portion
cgggacucaucugcaggcucug

SEQ ID NO: 975 - RNA, 22 nt, Artificial Sequence
  SARM1 targeting guide sequence portion
cgggaggagcggcccugcagga

SEQ ID NO: 976 - RNA, 22 nt, Artificial Sequence
  SARM1 targeting guide sequence portion
cucaaugguggccuccugguau

SEQ ID NO: 977 - RNA, 22 nt, Artificial Sequence
  SARM1 targeting guide sequence portion
cucaucugcaggcucugacacc

SEQ ID NO: 978 - RNA, 22 nt, Artificial Sequence
  SARM1 targeting guide sequence portion
cuccaaacuggugucagagccu

SEQ ID NO: 979 - RNA, 22 nt, Artificial Sequence
  SARM1 targeting guide sequence portion
cucccgggacucaucugcaggc

SEQ ID NO: 980 - RNA, 22 nt, Artificial Sequence
  SARM1 targeting guide sequence portion
cuccucccgggacucaucugca

SEQ ID NO: 981 - RNA, 22 nt, Artificial Sequence
  SARM1 targeting guide sequence portion
cuccugguauucgugggaccac

SEQ ID NO: 982 - RNA, 22 nt, Artificial Sequence
  SARM1 targeting guide sequence portion
cucugacaccaguuuggagggu

SEQ ID NO: 983 - RNA, 22 nt, Artificial Sequence
  SARM1 targeting guide sequence portion
cugacaccaguuuggagggugc

SEQ ID NO: 984 - RNA, 22 nt, Artificial Sequence
  SARM1 targeting guide sequence portion
cugcagaugagucccgggagga

SEQ ID NO: 985 - RNA, 22 nt, Artificial Sequence
  SARM1 targeting guide sequence portion
cugcaggaagcggaugaucuuc

SEQ ID NO: 986 - RNA, 22 nt, Artificial Sequence
  SARM1 targeting guide sequence portion
cugcaggcucugacaccaguuu

SEQ ID NO: 987 - RNA, 22 nt, Artificial Sequence
  SARM1 targeting guide sequence portion
cugcagggccgcuccucccggg

SEQ ID NO: 988 - RNA, 22 nt, Artificial Sequence
  SARM1 targeting guide sequence portion
cuggugucagagccugcagaug

SEQ ID NO: 989 - RNA, 22 nt, Artificial Sequence
  SARM1 targeting guide sequence portion
cuuccugcagggccgcuccucc

SEQ ID NO: 990 - RNA, 22 nt, Artificial Sequence
  SARM1 targeting guide sequence portion
cuucucaaugguggccuccugg

SEQ ID NO: 991 - RNA, 22 nt, Artificial Sequence
  SARM1 targeting guide sequence portion
gaagaucauccgcuuccugcag

SEQ ID NO: 992 - RNA, 22 nt, Artificial Sequence
  SARM1 targeting guide sequence portion
gaagcggaugaucuucucaaug

SEQ ID NO: 993 - RNA, 22 nt, Artificial Sequence
  SARM1 targeting guide sequence portion
gaauaccaggaggccaccauug

SEQ ID NO: 994 - RNA, 22 nt, Artificial Sequence
  SARM1 targeting guide sequence portion
gacaccaguuuggagggugcug

SEQ ID NO: 995 - RNA, 22 nt, Artificial Sequence
  SARM1 targeting guide sequence portion
gacccaugggugcagcacccuc

SEQ ID NO: 996 - RNA, 22 nt, Artificial Sequence
  SARM1 targeting guide sequence portion
gacucaucugcaggcucugaca

SEQ ID NO: 997 - RNA, 22 nt, Artificial Sequence
  SARM1 targeting guide sequence portion
gagaagaucauccgcuuccugc

SEQ ID NO: 998 - RNA, 22 nt, Artificial Sequence
  SARM1 targeting guide sequence portion
gagccugcagaugagucccggg

SEQ ID NO: 999 - RNA, 22 nt, Artificial Sequence
  SARM1 targeting guide sequence portion
gagcggcccugcaggaagcgga

SEQ ID NO: 1000 - RNA, 22 nt, Artificial Sequence
  SARM1 targeting guide sequence portion
gaggagcggcccugcaggaagc

SEQ ID NO: 1001 - RNA, 22 nt, Artificial Sequence
  SARM1 targeting guide sequence portion
gaggccaccauugagaagauca

SEQ ID NO: 1002 - RNA, 22 nt, Artificial Sequence
  SARM1 targeting guide sequence portion
gagggugcugcacccauggguc

SEQ ID NO: 1003 - RNA, 22 nt, Artificial Sequence
  SARM1 targeting guide sequence portion
gagucccgggaggagcggcccu

SEQ ID NO: 1004 - RNA, 22 nt, Artificial Sequence
  SARM1 targeting guide sequence portion
gaucauccgcuuccugcagggc

SEQ ID NO: 1005 - RNA, 22 nt, Artificial Sequence
  SARM1 targeting guide sequence portion
gaucuucucaaugguggccucc

SEQ ID NO: 1006 - RNA, 22 nt, Artificial Sequence
  SARM1 targeting guide sequence portion
gaugagucccgggaggagcggc

SEQ ID NO: 1007 - RNA, 22 nt, Artificial Sequence
  SARM1 targeting guide sequence portion
gaugaucuucucaaugguggcc

SEQ ID NO: 1008 - RNA, 22 nt, Artificial Sequence
  SARM1 targeting guide sequence portion
gcacccuccaaacuggugucag

SEQ ID NO: 1009 - RNA, 22 nt, Artificial Sequence
  SARM1 targeting guide sequence portion
gcagaugagucccgggaggagc

SEQ ID NO: 1010 - RNA, 22 nt, Artificial Sequence
  SARM1 targeting guide sequence portion
gcagcacccuccaaacuggugu

SEQ ID NO: 1011 - RNA, 22 nt, Artificial Sequence
  SARM1 targeting guide sequence portion
gcaggaagcggaugaucuucuc

SEQ ID NO: 1012 - RNA, 22 nt, Artificial Sequence
  SARM1 targeting guide sequence portion
gcaggcucugacaccaguuugg

SEQ ID NO: 1013 - RNA, 22 nt, Artificial Sequence
  SARM1 targeting guide sequence portion
gcagggccgcuccucccgggac

SEQ ID NO: 1014 - RNA, 22 nt, Artificial Sequence
  SARM1 targeting guide sequence portion
gccaccauugagaagaucaucc

SEQ ID NO: 1015 - RNA, 22 nt, Artificial Sequence
  SARM1 targeting guide sequence portion
gcccugcaggaagcggaugauc

SEQ ID NO: 1016 - RNA, 22 nt, Artificial Sequence
  SARM1 targeting guide sequence portion
gccgcuccucccgggacucauc

SEQ ID NO: 1017 - RNA, 22 nt, Artificial Sequence
  SARM1 targeting guide sequence portion
gccuccugguauucgugggacc

SEQ ID NO: 1018 - RNA, 22 nt, Artificial Sequence
  SARM1 targeting guide sequence portion
gccugcagaugagucccgggag

SEQ ID NO: 1019 - RNA, 22 nt, Artificial Sequence
  SARM1 targeting guide sequence portion
gcggaugaucuucucaauggug

SEQ ID NO: 1020 - RNA, 22 nt, Artificial Sequence
  SARM1 targeting guide sequence portion
gcggcccugcaggaagcggaug

SEQ ID NO: 1021 - RNA, 22 nt, Artificial Sequence
  SARM1 targeting guide sequence portion
gcuccucccgggacucaucugc

SEQ ID NO: 1022 - RNA, 22 nt, Artificial Sequence
  SARM1 targeting guide sequence portion
gcucugacaccaguuuggaggg

SEQ ID NO: 1023 - RNA, 22 nt, Artificial Sequence
  SARM1 targeting guide sequence portion
gcuuccugcagggccgcuccuc

SEQ ID NO: 1024 - RNA, 22 nt, Artificial Sequence
  SARM1 targeting guide sequence portion
ggaagcggaugaucuucucaau

SEQ ID NO: 1025 - RNA, 22 nt, Artificial Sequence
  SARM1 targeting guide sequence portion
ggacccaugggugcagcacccu

SEQ ID NO: 1026 - RNA, 22 nt, Artificial Sequence
  SARM1 targeting guide sequence portion
ggacucaucugcaggcucugac

SEQ ID NO: 1027 - RNA, 22 nt, Artificial Sequence
  SARM1 targeting guide sequence portion
ggagcggcccugcaggaagcgg

SEQ ID NO: 1028 - RNA, 22 nt, Artificial Sequence
  SARM1 targeting guide sequence portion
ggaggagcggcccugcaggaag

SEQ ID NO: 1029 - RNA, 22 nt, Artificial Sequence
  SARM1 targeting guide sequence portion
ggaggccaccauugagaagauc

SEQ ID NO: 1030 - RNA, 22 nt, Artificial Sequence
  SARM1 targeting guide sequence portion
ggagggugcugcacccaugggu

SEQ ID NO: 1031 - RNA, 22 nt, Artificial Sequence
  SARM1 targeting guide sequence portion
ggaugaucuucucaaugguggc

SEQ ID NO: 1032 - RNA, 22 nt, Artificial Sequence
  SARM1 targeting guide sequence portion
ggccaccauugagaagaucauc

SEQ ID NO: 1033 - RNA, 22 nt, Artificial Sequence
  SARM1 targeting guide sequence portion
ggcccugcaggaagcggaugau

SEQ ID NO: 1034 - RNA, 22 nt, Artificial Sequence
  SARM1 targeting guide sequence portion
ggccgcuccucccgggacucau

SEQ ID NO: 1035 - RNA, 22 nt, Artificial Sequence
  SARM1 targeting guide sequence portion
ggccuccugguauucgugggac

SEQ ID NO: 1036 - RNA, 22 nt, Artificial Sequence
  SARM1 targeting guide sequence portion
ggcucugacaccaguuuggagg

SEQ ID NO: 1037 - RNA, 22 nt, Artificial Sequence
  SARM1 targeting guide sequence portion
gggacucaucugcaggcucuga

SEQ ID NO: 1038 - RNA, 22 nt, Artificial Sequence
  SARM1 targeting guide sequence portion
gggaggagcggcccugcaggaa

SEQ ID NO: 1039 - RNA, 22 nt, Artificial Sequence
  SARM1 targeting guide sequence portion
gggccgcuccucccgggacuca

SEQ ID NO: 1040 - RNA, 22 nt, Artificial Sequence
  SARM1 targeting guide sequence portion
gggugcagcacccuccaaacug

SEQ ID NO: 1041 - RNA, 22 nt, Artificial Sequence
  SARM1 targeting guide sequence portion
gggugcugcacccaugggucca

SEQ ID NO: 1042 - RNA, 22 nt, Artificial Sequence
  SARM1 targeting guide sequence portion
ggucccacgaauaccaggaggc

SEQ ID NO: 1043 - RNA, 22 nt, Artificial Sequence
  SARM1 targeting guide sequence portion
ggugcagcacccuccaaacugg

SEQ ID NO: 1044 - RNA, 22 nt, Artificial Sequence
  SARM1 targeting guide sequence portion
gguggccuccugguauucgugg

SEQ ID NO: 1045 - RNA, 22 nt, Artificial Sequence
  SARM1 targeting guide sequence portion
gguggucccacgaauaccagga

SEQ ID NO: 1046 - RNA, 22 nt, Artificial Sequence
  SARM1 targeting guide sequence portion
ggugucagagccugcagaugag

SEQ ID NO: 1047 - RNA, 22 nt, Artificial Sequence
  SARM1 targeting guide sequence portion
gguuggacccaugggugcagca

SEQ ID NO: 1048 - RNA, 22 nt, Artificial Sequence
  SARM1 targeting guide sequence portion
gucagagccugcagaugagucc

SEQ ID NO: 1049 - RNA, 22 nt, Artificial Sequence
  SARM1 targeting guide sequence portion
gucccacgaauaccaggaggcc

SEQ ID NO: 1050 - RNA, 22 nt, Artificial Sequence
  SARM1 targeting guide sequence portion
gucccgggaggagcggcccugc

SEQ ID NO: 1051 - RNA, 22 nt, Artificial Sequence
  SARM1 targeting guide sequence portion
gugcagcacccuccaaacuggu

SEQ ID NO: 1052 - RNA, 22 nt, Artificial Sequence
  SARM1 targeting guide sequence portion
guggccuccugguauucguggg

SEQ ID NO: 1053 - RNA, 22 nt, Artificial Sequence
  SARM1 targeting guide sequence portion
guggucccacgaauaccaggag

SEQ ID NO: 1054 - RNA, 22 nt, Artificial Sequence
  SARM1 targeting guide sequence portion
gugucagagccugcagaugagu

SEQ ID NO: 1055 - RNA, 22 nt, Artificial Sequence
  SARM1 targeting guide sequence portion
guuggacccaugggugcagcac

SEQ ID NO: 1056 - RNA, 22 nt, Artificial Sequence
  SARM1 targeting guide sequence portion
guuuggagggugcugcacccau

SEQ ID NO: 1057 - RNA, 22 nt, Artificial Sequence
  SARM1 targeting guide sequence portion
uaccaggaggccaccauugaga

SEQ ID NO: 1058 - RNA, 22 nt, Artificial Sequence
  SARM1 targeting guide sequence portion
uagguuggacccaugggugcag

SEQ ID NO: 1059 - RNA, 22 nt, Artificial Sequence
  SARM1 targeting guide sequence portion
ucaaugguggccuccugguauu

SEQ ID NO: 1060 - RNA, 22 nt, Artificial Sequence
  SARM1 targeting guide sequence portion
ucagagccugcagaugaguccc

SEQ ID NO: 1061 - RNA, 22 nt, Artificial Sequence
  SARM1 targeting guide sequence portion
ucauccgcuuccugcagggccg

SEQ ID NO: 1062 - RNA, 22 nt, Artificial Sequence
  SARM1 targeting guide sequence portion
ucaucugcaggcucugacacca

SEQ ID NO: 1063 - RNA, 22 nt, Artificial Sequence
  SARM1 targeting guide sequence portion
uccaaacuggugucagagccug

SEQ ID NO: 1064 - RNA, 22 nt, Artificial Sequence
  SARM1 targeting guide sequence portion
ucccacgaauaccaggaggcca

SEQ ID NO: 1065 - RNA, 22 nt, Artificial Sequence
  SARM1 targeting guide sequence portion
ucccgggacucaucugcaggcu

SEQ ID NO: 1066 - RNA, 22 nt, Artificial Sequence
  SARM1 targeting guide sequence portion
ucccgggaggagcggcccugca

SEQ ID NO: 1067 - RNA, 22 nt, Artificial Sequence
  SARM1 targeting guide sequence portion
uccgcuuccugcagggccgcuc

SEQ ID NO: 1068 - RNA, 22 nt, Artificial Sequence
  SARM1 targeting guide sequence portion
uccucccgggacucaucugcag

SEQ ID NO: 1069 - RNA, 22 nt, Artificial Sequence
  SARM1 targeting guide sequence portion
uccugcagggccgcuccucccg

SEQ ID NO: 1070 - RNA, 22 nt, Artificial Sequence
  SARM1 targeting guide sequence portion
uccugguauucgugggaccacc

SEQ ID NO: 1071 - RNA, 22 nt, Artificial Sequence
  SARM1 targeting guide sequence portion
ucucaaugguggccuccuggua

SEQ ID NO: 1072 - RNA, 22 nt, Artificial Sequence
  SARM1 targeting guide sequence portion
ucugacaccaguuuggagggug

SEQ ID NO: 1073 - RNA, 22 nt, Artificial Sequence
  SARM1 targeting guide sequence portion
ucugcaggcucugacaccaguu

SEQ ID NO: 1074 - RNA, 22 nt, Artificial Sequence
  SARM1 targeting guide sequence portion
ucuucucaaugguggccuccug

SEQ ID NO: 1075 - RNA, 22 nt, Artificial Sequence
  SARM1 targeting guide sequence portion
ugacaccaguuuggagggugcu

SEQ ID NO: 1076 - RNA, 22 nt, Artificial Sequence
  SARM1 targeting guide sequence portion
ugagaagaucauccgcuuccug

SEQ ID NO: 1077 - RNA, 22 nt, Artificial Sequence
  SARM1 targeting guide sequence portion
ugagucccgggaggagcggccc

SEQ ID NO: 1078 - RNA, 22 nt, Artificial Sequence
  SARM1 targeting guide sequence portion
ugaucuucucaaugguggccuc

SEQ ID NO: 1079 - RNA, 22 nt, Artificial Sequence
  SARM1 targeting guide sequence portion
ugcagaugagucccgggaggag

SEQ ID NO: 1080 - RNA, 22 nt, Artificial Sequence
  SARM1 targeting guide sequence portion
ugcagcacccuccaaacuggug

SEQ ID NO: 1081 - RNA, 22 nt, Artificial Sequence
  SARM1 targeting guide sequence portion
ugcaggaagcggaugaucuucu

SEQ ID NO: 1082 - RNA, 22 nt, Artificial Sequence
  SARM1 targeting guide sequence portion
ugcaggcucugacaccaguuug

SEQ ID NO: 1083 - RNA, 22 nt, Artificial Sequence
  SARM1 targeting guide sequence portion
ugcagggccgcuccucccggga

SEQ ID NO: 1084 - RNA, 22 nt, Artificial Sequence
  SARM1 targeting guide sequence portion
uggacccaugggugcagcaccc

SEQ ID NO: 1085 - RNA, 22 nt, Artificial Sequence
  SARM1 targeting guide sequence portion
uggagggugcugcacccauggg

SEQ ID NO: 1086 - RNA, 22 nt, Artificial Sequence
  SARM1 targeting guide sequence portion
uggccuccugguauucguggga

SEQ ID NO: 1087 - RNA, 22 nt, Artificial Sequence
  SARM1 targeting guide sequence portion
ugggugcagcacccuccaaacu

SEQ ID NO: 1088 - RNA, 22 nt, Artificial Sequence
  SARM1 targeting guide sequence portion
uggucccacgaauaccaggagg

SEQ ID NO: 1089 - RNA, 22 nt, Artificial Sequence
  SARM1 targeting guide sequence portion
ugguggccuccugguauucgug

SEQ ID NO: 1090 - RNA, 22 nt, Artificial Sequence
  SARM1 targeting guide sequence portion
uggugucagagccugcagauga

SEQ ID NO: 1091 - RNA, 22 nt, Artificial Sequence
  SARM1 targeting guide sequence portion
ugucagagccugcagaugaguc

SEQ ID NO: 1092 - RNA, 22 nt, Artificial Sequence
  SARM1 targeting guide sequence portion
uuagguuggacccaugggugca

SEQ ID NO: 1093 - RNA, 22 nt, Artificial Sequence
  SARM1 targeting guide sequence portion
uuccugcagggccgcuccuccc

SEQ ID NO: 1094 - RNA, 22 nt, Artificial Sequence
  SARM1 targeting guide sequence portion
uucucaaugguggccuccuggu

SEQ ID NO: 1095 - RNA, 22 nt, Artificial Sequence
  SARM1 targeting guide sequence portion
uugagaagaucauccgcuuccu

SEQ ID NO: 1096 - RNA, 22 nt, Artificial Sequence
  SARM1 targeting guide sequence portion
uuggacccaugggugcagcacc

SEQ ID NO: 1097 - RNA, 22 nt, Artificial Sequence
  SARM1 targeting guide sequence portion
uuggagggugcugcacccaugg

SEQ ID NO: 1098 - RNA, 22 nt, Artificial Sequence
  SARM1 targeting guide sequence portion
uuuggagggugcugcacccaug

SEQ ID NO: 1099 - RNA, 20 nt, Artificial Sequence
  SARM1 targeting guide sequence portion
aacagcaggucgaggccgcc

SEQ ID NO: 1100 - RNA, 20 nt, Artificial Sequence
  SARM1 targeting guide sequence portion
aacuccggcgccugcagcag

SEQ ID NO: 1101 - RNA, 20 nt, Artificial Sequence
  SARM1 targeting guide sequence portion
aacugguggaggaggccugg

SEQ ID NO: 1102 - RNA, 20 nt, Artificial Sequence
  SARM1 targeting guide sequence portion
aagaagcgacacagcuugua

SEQ ID NO: 1103 - RNA, 20 nt, Artificial Sequence
  SARM1 targeting guide sequence portion
aagaccucggccaggccggc

SEQ ID NO: 1104 - RNA, 20 nt, Artificial Sequence
  SARM1 targeting guide sequence portion
aagcaggcgggcggcgcgcg

SEQ ID NO: 1105 - RNA, 20 nt, Artificial Sequence
  SARM1 targeting guide sequence portion
aagcgacacagcuuguaggc

SEQ ID NO: 1106 - RNA, 20 nt, Artificial Sequence
  SARM1 targeting guide sequence portion
aagcugugucgcuucuucgc

SEQ ID NO: 1107 - RNA, 20 nt, Artificial Sequence
  SARM1 targeting guide sequence portion
aaggccugcugcagcuccgg

SEQ ID NO: 1108 - RNA, 20 nt, Artificial Sequence
  SARM1 targeting guide sequence portion
aagugucgccgggggcaggc

SEQ ID NO: 1109 - RNA, 20 nt, Artificial Sequence
  SARM1 targeting guide sequence portion
acaagcugugucgcuucuuc

SEQ ID NO: 1110 - RNA, 20 nt, Artificial Sequence
  SARM1 targeting guide sequence portion
acaaggccugcugcagcucc

SEQ ID NO: 1111 - RNA, 20 nt, Artificial Sequence
  SARM1 targeting guide sequence portion
acacagcuuguaggcggaga

SEQ ID NO: 1112 - RNA, 20 nt, Artificial Sequence
  SARM1 targeting guide sequence portion
acacgcgucuccaacuccgg

SEQ ID NO: 1113 - RNA, 20 nt, Artificial Sequence
  SARM1 targeting guide sequence portion
acacuucgcggggcccgcgg

SEQ ID NO: 1114 - RNA, 20 nt, Artificial Sequence
  SARM1 targeting guide sequence portion
acagacccugggcuaccucg

SEQ ID NO: 1115 - RNA, 20 nt, Artificial Sequence
  SARM1 targeting guide sequence portion
acagcaggucgaggccgcca

SEQ ID NO: 1116 - RNA, 20 nt, Artificial Sequence
  SARM1 targeting guide sequence portion
acagcuuguaggcggagaga

SEQ ID NO: 1117 - RNA, 20 nt, Artificial Sequence
  SARM1 targeting guide sequence portion
acauggcgaagaagcgacac

SEQ ID NO: 1118 - RNA, 20 nt, Artificial Sequence
  SARM1 targeting guide sequence portion
accaggaucugcuccagcag

SEQ ID NO: 1119 - RNA, 20 nt, Artificial Sequence
  SARM1 targeting guide sequence portion
accaguuggaagaccucggc

SEQ ID NO: 1120 - RNA, 20 nt, Artificial Sequence
  SARM1 targeting guide sequence portion
accaugggcccgugccaccg

SEQ ID NO: 1121 - RNA, 20 nt, Artificial Sequence
  SARM1 targeting guide sequence portion
acccugggcuaccucgcggc

SEQ ID NO: 1122 - RNA, 20 nt, Artificial Sequence
  SARM1 targeting guide sequence portion
accgaggugcaggacgcccu

SEQ ID NO: 1123 - RNA, 20 nt, Artificial Sequence
  SARM1 targeting guide sequence portion
accgcccccaucuggcccag

SEQ ID NO: 1124 - RNA, 20 nt, Artificial Sequence
  SARM1 targeting guide sequence portion
accgguucucagccaccagg

SEQ ID NO: 1125 - RNA, 20 nt, Artificial Sequence
  SARM1 targeting guide sequence portion
accucggccaggccggcgcc

SEQ ID NO: 1126 - RNA, 20 nt, Artificial Sequence
  SARM1 targeting guide sequence portion
accucggugccugcccccgg

SEQ ID NO: 1127 - RNA, 20 nt, Artificial Sequence
  SARM1 targeting guide sequence portion
accugcuguugcggcugcug

SEQ ID NO: 1128 - RNA, 20 nt, Artificial Sequence
  SARM1 targeting guide sequence portion
acgccauccgccucgauggc

SEQ ID NO: 1129 - RNA, 20 nt, Artificial Sequence
  SARM1 targeting guide sequence portion
acgcccuggagcgcgcgcug

SEQ ID NO: 1130 - RNA, 20 nt, Artificial Sequence
  SARM1 targeting guide sequence portion
acgcgucuccaacuccggcg

SEQ ID NO: 1131 - RNA, 20 nt, Artificial Sequence
  SARM1 targeting guide sequence portion
acgcgugugcaggccgcgcg

SEQ ID NO: 1132 - RNA, 20 nt, Artificial Sequence
  SARM1 targeting guide sequence portion
acgcugcuucucuccgccua

SEQ ID NO: 1133 - RNA, 20 nt, Artificial Sequence
  SARM1 targeting guide sequence portion
acggcccgcgcgccgcccgc

SEQ ID NO: 1134 - RNA, 20 nt, Artificial Sequence
  SARM1 targeting guide sequence portion
acuccggcgccugcagcagc

SEQ ID NO: 1135 - RNA, 20 nt, Artificial Sequence
  SARM1 targeting guide sequence portion
acugguggaggaggccuggc

SEQ ID NO: 1136 - RNA, 20 nt, Artificial Sequence
  SARM1 targeting guide sequence portion
agaagcgacacagcuuguag

SEQ ID NO: 1137 - RNA, 20 nt, Artificial Sequence
  SARM1 targeting guide sequence portion
agacccugggcuaccucgcg

SEQ ID NO: 1138 - RNA, 20 nt, Artificial Sequence
  SARM1 targeting guide sequence portion
agaccucggccaggccggcg

SEQ ID NO: 1139 - RNA, 20 nt, Artificial Sequence
  SARM1 targeting guide sequence portion
agacgcgugugcaggccgcg

SEQ ID NO: 1140 - RNA, 20 nt, Artificial Sequence
  SARM1 targeting guide sequence portion
agauccugguggcugagaac

SEQ ID NO: 1141 - RNA, 20 nt, Artificial Sequence
  SARM1 targeting guide sequence portion
agaugggggcgguggcacgg

SEQ ID NO: 1142 - RNA, 20 nt, Artificial Sequence
  SARM1 targeting guide sequence portion
agcagauccugguggcugag

SEQ ID NO: 1143 - RNA, 20 nt, Artificial Sequence
  SARM1 targeting guide sequence portion
agcagccaggccuccuccac

SEQ ID NO: 1144 - RNA, 20 nt, Artificial Sequence
  SARM1 targeting guide sequence portion
agcagccgcaacagcagguc

SEQ ID NO: 1145 - RNA, 20 nt, Artificial Sequence
  SARM1 targeting guide sequence portion
agcaggccuuguccgcgcug

SEQ ID NO: 1146 - RNA, 20 nt, Artificial Sequence
  SARM1 targeting guide sequence portion
agcaggcgcgcggccugcac

SEQ ID NO: 1147 - RNA, 20 nt, Artificial Sequence
  SARM1 targeting guide sequence portion
agcaggucgaggccgccauc

SEQ ID NO: 1148 - RNA, 20 nt, Artificial Sequence
  SARM1 targeting guide sequence portion
agccaccaggaucugcucca

SEQ ID NO: 1149 - RNA, 20 nt, Artificial Sequence
  SARM1 targeting guide sequence portion
agccaggccuccuccaccag

SEQ ID NO: 1150 - RNA, 20 nt, Artificial Sequence
  SARM1 targeting guide sequence portion
agcccaccaugggcccgugc

SEQ ID NO: 1151 - RNA, 20 nt, Artificial Sequence
  SARM1 targeting guide sequence portion
agcccagggucugugcgacg

SEQ ID NO: 1152 - RNA, 20 nt, Artificial Sequence
  SARM1 targeting guide sequence portion
agccgcaacagcaggucgag

SEQ ID NO: 1153 - RNA, 20 nt, Artificial Sequence
  SARM1 targeting guide sequence portion
agcgacacagcuuguaggcg

SEQ ID NO: 1154 - RNA, 20 nt, Artificial Sequence
  SARM1 targeting guide sequence portion
agcgcgcgcuccagggcguc

SEQ ID NO: 1155 - RNA, 20 nt, Artificial Sequence
  SARM1 targeting guide sequence portion
agcgcgcgcugccggagcug

SEQ ID NO: 1156 - RNA, 20 nt, Artificial Sequence
  SARM1 targeting guide sequence portion
agcgcggacaaggccugcug

SEQ ID NO: 1157 - RNA, 20 nt, Artificial Sequence
  SARM1 targeting guide sequence portion
agcggcuggcggugccuggg

SEQ ID NO: 1158 - RNA, 20 nt, Artificial Sequence
  SARM1 targeting guide sequence portion
agcuccggcagcgcgcgcuc

SEQ ID NO: 1159 - RNA, 20 nt, Artificial Sequence
  SARM1 targeting guide sequence portion
agcugcagcaggccuugucc

SEQ ID NO: 1160 - RNA, 20 nt, Artificial Sequence
  SARM1 targeting guide sequence portion
agcugugucgcuucuucgcc

SEQ ID NO: 1161 - RNA, 20 nt, Artificial Sequence
  SARM1 targeting guide sequence portion
agcuuguaggcggagagaag

SEQ ID NO: 1162 - RNA, 20 nt, Artificial Sequence
  SARM1 targeting guide sequence portion
aggacgcccuggagcgcgcg

SEQ ID NO: 1163 - RNA, 20 nt, Artificial Sequence
  SARM1 targeting guide sequence portion
aggaucugcuccagcaggcg

SEQ ID NO: 1164 - RNA, 20 nt, Artificial Sequence
  SARM1 targeting guide sequence portion
aggcaccgaggugcaggacg

SEQ ID NO: 1165 - RNA, 20 nt, Artificial Sequence
  SARM1 targeting guide sequence portion
aggcaccgccagccgcucgg

SEQ ID NO: 1166 - RNA, 20 nt, Artificial Sequence
  SARM1 targeting guide sequence portion
aggccgccaucgaggcggau

SEQ ID NO: 1167 - RNA, 20 nt, Artificial Sequence
  SARM1 targeting guide sequence portion
aggccgcgcgccugcuggag

SEQ ID NO: 1168 - RNA, 20 nt, Artificial Sequence
  SARM1 targeting guide sequence portion
aggccuccuccaccaguugg

SEQ ID NO: 1169 - RNA, 20 nt, Artificial Sequence
  SARM1 targeting guide sequence portion
aggccugcugcagcuccggc

SEQ ID NO: 1170 - RNA, 20 nt, Artificial Sequence
  SARM1 targeting guide sequence portion
aggccuuguccgcgcugaag

SEQ ID NO: 1171 - RNA, 20 nt, Artificial Sequence
  SARM1 targeting guide sequence portion
aggcgccggaguuggagacg

SEQ ID NO: 1172 - RNA, 20 nt, Artificial Sequence
  SARM1 targeting guide sequence portion
aggcgcgcggccugcacacg

SEQ ID NO: 1173 - RNA, 20 nt, Artificial Sequence
  SARM1 targeting guide sequence portion
aggcggagagaagcagcguc

SEQ ID NO: 1174 - RNA, 20 nt, Artificial Sequence
  SARM1 targeting guide sequence portion
aggcggauggcgucgcacag

SEQ ID NO: 1175 - RNA, 20 nt, Artificial Sequence
  SARM1 targeting guide sequence portion
agggcguccugcaccucggu

SEQ ID NO: 1176 - RNA, 20 nt, Artificial Sequence
  SARM1 targeting guide sequence portion
agggucugugcgacgccauc

SEQ ID NO: 1177 - RNA, 20 nt, Artificial Sequence
  SARM1 targeting guide sequence portion
agguagcccagggucugugc

SEQ ID NO: 1178 - RNA, 20 nt, Artificial Sequence
  SARM1 targeting guide sequence portion
aggucgaggccgccaucgag

SEQ ID NO: 1179 - RNA, 20 nt, Artificial Sequence
  SARM1 targeting guide sequence portion
aggucuuccaacugguggag

SEQ ID NO: 1180 - RNA, 20 nt, Artificial Sequence
  SARM1 targeting guide sequence portion
aggugcaggacgcccuggag

SEQ ID NO: 1181 - RNA, 20 nt, Artificial Sequence
  SARM1 targeting guide sequence portion
agugucgccgggggcaggca

SEQ ID NO: 1182 - RNA, 20 nt, Artificial Sequence
  SARM1 targeting guide sequence portion
aguuggaagaccucggccag

SEQ ID NO: 1183 - RNA, 20 nt, Artificial Sequence
  SARM1 targeting guide sequence portion
aguuggagacgcgugugcag

SEQ ID NO: 1184 - RNA, 20 nt, Artificial Sequence
  SARM1 targeting guide sequence portion
auccgccucgauggcggccu

SEQ ID NO: 1185 - RNA, 20 nt, Artificial Sequence
  SARM1 targeting guide sequence portion
auccugguggcugagaaccg

SEQ ID NO: 1186 - RNA, 20 nt, Artificial Sequence
  SARM1 targeting guide sequence portion
aucgaggcggauggcgucgc

SEQ ID NO: 1187 - RNA, 20 nt, Artificial Sequence
  SARM1 targeting guide sequence portion
aucugcuccagcaggcgcgc

SEQ ID NO: 1188 - RNA, 20 nt, Artificial Sequence
  SARM1 targeting guide sequence portion
aucuggcccaggcaccgcca

SEQ ID NO: 1189 - RNA, 20 nt, Artificial Sequence
  SARM1 targeting guide sequence portion
auggcgaagaagcgacacag

SEQ ID NO: 1190 - RNA, 20 nt, Artificial Sequence
  SARM1 targeting guide sequence portion
auggcggccucgaccugcug

SEQ ID NO: 1191 - RNA, 20 nt, Artificial Sequence
  SARM1 targeting guide sequence portion
auggcgucgcacagacccug

SEQ ID NO: 1192 - RNA, 20 nt, Artificial Sequence
  SARM1 targeting guide sequence portion
augggcccgugccaccgccc

SEQ ID NO: 1193 - RNA, 20 nt, Artificial Sequence
  SARM1 targeting guide sequence portion
augggggcgguggcacgggc

SEQ ID NO: 1194 - RNA, 20 nt, Artificial Sequence
  SARM1 targeting guide sequence portion
augguccugacgcugcuucu

SEQ ID NO: 1195 - RNA, 20 nt, Artificial Sequence
  SARM1 targeting guide sequence portion
augucgggcccacggccggg

SEQ ID NO: 1196 - RNA, 20 nt, Artificial Sequence
  SARM1 targeting guide sequence portion
caacagcaggucgaggccgc

SEQ ID NO: 1197 - RNA, 20 nt, Artificial Sequence
  SARM1 targeting guide sequence portion
caacuccggcgccugcagca

SEQ ID NO: 1198 - RNA, 20 nt, Artificial Sequence
  SARM1 targeting guide sequence portion
caacugguggaggaggccug

SEQ ID NO: 1199 - RNA, 20 nt, Artificial Sequence
  SARM1 targeting guide sequence portion
caagcugugucgcuucuucg

SEQ ID NO: 1200 - RNA, 20 nt, Artificial Sequence
  SARM1 targeting guide sequence portion
caaggccugcugcagcuccg

SEQ ID NO: 1201 - RNA, 20 nt, Artificial Sequence
  SARM1 targeting guide sequence portion
cacacgcgucuccaacuccg

SEQ ID NO: 1202 - RNA, 20 nt, Artificial Sequence
  SARM1 targeting guide sequence portion
cacagacccugggcuaccuc

SEQ ID NO: 1203 - RNA, 20 nt, Artificial Sequence
  SARM1 targeting guide sequence portion
cacagcuuguaggcggagag

SEQ ID NO: 1204 - RNA, 20 nt, Artificial Sequence
  SARM1 targeting guide sequence portion
caccaggaucugcuccagca

SEQ ID NO: 1205 - RNA, 20 nt, Artificial Sequence
  SARM1 targeting guide sequence portion
caccaguuggaagaccucgg

SEQ ID NO: 1206 - RNA, 20 nt, Artificial Sequence
  SARM1 targeting guide sequence portion
caccaugggcccgugccacc

SEQ ID NO: 1207 - RNA, 20 nt, Artificial Sequence
  SARM1 targeting guide sequence portion
caccgaggugcaggacgccc

SEQ ID NO: 1208 - RNA, 20 nt, Artificial Sequence
  SARM1 targeting guide sequence portion
caccgcccccaucuggccca

SEQ ID NO: 1209 - RNA, 20 nt, Artificial Sequence
  SARM1 targeting guide sequence portion
caccgguucucagccaccag

SEQ ID NO: 1210 - RNA, 20 nt, Artificial Sequence
  SARM1 targeting guide sequence portion
caccucggugccugcccccg

SEQ ID NO: 1211 - RNA, 20 nt, Artificial Sequence
  SARM1 targeting guide sequence portion
cacgcgucuccaacuccggc

SEQ ID NO: 1212 - RNA, 20 nt, Artificial Sequence
  SARM1 targeting guide sequence portion
cacuucgcggggcccgcggc

SEQ ID NO: 1213 - RNA, 20 nt, Artificial Sequence
  SARM1 targeting guide sequence portion
cagacccugggcuaccucgc

SEQ ID NO: 1214 - RNA, 20 nt, Artificial Sequence
  SARM1 targeting guide sequence portion
cagauccugguggcugagaa

SEQ ID NO: 1215 - RNA, 20 nt, Artificial Sequence
  SARM1 targeting guide sequence portion
cagaugggggcgguggcacg

SEQ ID NO: 1216 - RNA, 20 nt, Artificial Sequence
  SARM1 targeting guide sequence portion
cagcagccaggccuccucca

SEQ ID NO: 1217 - RNA, 20 nt, Artificial Sequence
  SARM1 targeting guide sequence portion
cagcagccgcaacagcaggu

SEQ ID NO: 1218 - RNA, 20 nt, Artificial Sequence
  SARM1 targeting guide sequence portion
cagcaggccuuguccgcgcu

SEQ ID NO: 1219 - RNA, 20 nt, Artificial Sequence
  SARM1 targeting guide sequence portion
cagcaggcgcgcggccugca

SEQ ID NO: 1220 - RNA, 20 nt, Artificial Sequence
  SARM1 targeting guide sequence portion
cagcaggucgaggccgccau

SEQ ID NO: 1221 - RNA, 20 nt, Artificial Sequence
  SARM1 targeting guide sequence portion
cagccaccaggaucugcucc

SEQ ID NO: 1222 - RNA, 20 nt, Artificial Sequence
  SARM1 targeting guide sequence portion
cagccaggccuccuccacca

SEQ ID NO: 1223 - RNA, 20 nt, Artificial Sequence
  SARM1 targeting guide sequence portion
cagccgcaacagcaggucga

SEQ ID NO: 1224 - RNA, 20 nt, Artificial Sequence
  SARM1 targeting guide sequence portion
cagcgcgcgcuccagggcgu

SEQ ID NO: 1225 - RNA, 20 nt, Artificial Sequence
  SARM1 targeting guide sequence portion
cagcgcggacaaggccugcu

SEQ ID NO: 1226 - RNA, 20 nt, Artificial Sequence
  SARM1 targeting guide sequence portion
cagcuccggcagcgcgcgcu

SEQ ID NO: 1227 - RNA, 20 nt, Artificial Sequence
  SARM1 targeting guide sequence portion
cagcuuguaggcggagagaa

SEQ ID NO: 1228 - RNA, 20 nt, Artificial Sequence
  SARM1 targeting guide sequence portion
caggacgcccuggagcgcgc

SEQ ID NO: 1229 - RNA, 20 nt, Artificial Sequence
  SARM1 targeting guide sequence portion
caggaucugcuccagcaggc

SEQ ID NO: 1230 - RNA, 20 nt, Artificial Sequence
  SARM1 targeting guide sequence portion
caggcaccgaggugcaggac

SEQ ID NO: 1231 - RNA, 20 nt, Artificial Sequence
  SARM1 targeting guide sequence portion
caggcaccgccagccgcucg

SEQ ID NO: 1232 - RNA, 20 nt, Artificial Sequence
  SARM1 targeting guide sequence portion
caggccgcgcgccugcugga

SEQ ID NO: 1233 - RNA, 20 nt, Artificial Sequence
  SARM1 targeting guide sequence portion
caggccuccuccaccaguug

SEQ ID NO: 1234 - RNA, 20 nt, Artificial Sequence
  SARM1 targeting guide sequence portion
caggccuuguccgcgcugaa

SEQ ID NO: 1235 - RNA, 20 nt, Artificial Sequence
  SARM1 targeting guide sequence portion
caggcgccggaguuggagac

SEQ ID NO: 1236 - RNA, 20 nt, Artificial Sequence
  SARM1 targeting guide sequence portion
caggcgcgcggccugcacac

SEQ ID NO: 1237 - RNA, 20 nt, Artificial Sequence
  SARM1 targeting guide sequence portion
cagggcguccugcaccucgg

SEQ ID NO: 1238 - RNA, 20 nt, Artificial Sequence
  SARM1 targeting guide sequence portion
cagggucugugcgacgccau

SEQ ID NO: 1239 - RNA, 20 nt, Artificial Sequence
  SARM1 targeting guide sequence portion
caggucgaggccgccaucga

SEQ ID NO: 1240 - RNA, 20 nt, Artificial Sequence
  SARM1 targeting guide sequence portion
caguuggaagaccucggcca

SEQ ID NO: 1241 - RNA, 20 nt, Artificial Sequence
  SARM1 targeting guide sequence portion
cauccgccucgauggcggcc

SEQ ID NO: 1242 - RNA, 20 nt, Artificial Sequence
  SARM1 targeting guide sequence portion
caucgaggcggauggcgucg

SEQ ID NO: 1243 - RNA, 20 nt, Artificial Sequence
  SARM1 targeting guide sequence portion
caucuggcccaggcaccgcc

SEQ ID NO: 1244 - RNA, 20 nt, Artificial Sequence
  SARM1 targeting guide sequence portion
cauggcgaagaagcgacaca

SEQ ID NO: 1245 - RNA, 20 nt, Artificial Sequence
  SARM1 targeting guide sequence portion
caugggcccgugccaccgcc

SEQ ID NO: 1246 - RNA, 20 nt, Artificial Sequence
  SARM1 targeting guide sequence portion
caugucgggcccacggccgg

SEQ ID NO: 1247 - RNA, 20 nt, Artificial Sequence
  SARM1 targeting guide sequence portion
ccaacuccggcgccugcagc

SEQ ID NO: 1248 - RNA, 20 nt, Artificial Sequence
  SARM1 targeting guide sequence portion
ccaacugguggaggaggccu

SEQ ID NO: 1249 - RNA, 20 nt, Artificial Sequence
  SARM1 targeting guide sequence portion
ccaccaggaucugcuccagc

SEQ ID NO: 1250 - RNA, 20 nt, Artificial Sequence
  SARM1 targeting guide sequence portion
ccaccaguuggaagaccucg

SEQ ID NO: 1251 - RNA, 20 nt, Artificial Sequence
  SARM1 targeting guide sequence portion
ccaccaugggcccgugccac

SEQ ID NO: 1252 - RNA, 20 nt, Artificial Sequence
  SARM1 targeting guide sequence portion
ccaccgcccccaucuggccc

SEQ ID NO: 1253 - RNA, 20 nt, Artificial Sequence
  SARM1 targeting guide sequence portion
ccagaugggggcgguggcac

SEQ ID NO: 1254 - RNA, 20 nt, Artificial Sequence
  SARM1 targeting guide sequence portion
ccagcaggcgcgcggccugc

SEQ ID NO: 1255 - RNA, 20 nt, Artificial Sequence
  SARM1 targeting guide sequence portion
ccaggaucugcuccagcagg

SEQ ID NO: 1256 - RNA, 20 nt, Artificial Sequence
  SARM1 targeting guide sequence portion
ccaggcaccgccagccgcuc

SEQ ID NO: 1257 - RNA, 20 nt, Artificial Sequence
  SARM1 targeting guide sequence portion
ccaggccuccuccaccaguu

SEQ ID NO: 1258 - RNA, 20 nt, Artificial Sequence
  SARM1 targeting guide sequence portion
ccagggcguccugcaccucg

SEQ ID NO: 1259 - RNA, 20 nt, Artificial Sequence
  SARM1 targeting guide sequence portion
ccagggucugugcgacgcca

SEQ ID NO: 1260 - RNA, 20 nt, Artificial Sequence
  SARM1 targeting guide sequence portion
ccaguuggaagaccucggcc

SEQ ID NO: 1261 - RNA, 20 nt, Artificial Sequence
  SARM1 targeting guide sequence portion
ccauccgccucgauggcggc

SEQ ID NO: 1262 - RNA, 20 nt, Artificial Sequence
  SARM1 targeting guide sequence portion
ccaucgaggcggauggcguc

SEQ ID NO: 1263 - RNA, 20 nt, Artificial Sequence
  SARM1 targeting guide sequence portion
ccaucuggcccaggcaccgc

SEQ ID NO: 1264 - RNA, 20 nt, Artificial Sequence
  SARM1 targeting guide sequence portion
ccaugggcccgugccaccgc

SEQ ID NO: 1265 - RNA, 20 nt, Artificial Sequence
  SARM1 targeting guide sequence portion
ccaugucgggcccacggccg

SEQ ID NO: 1266 - RNA, 20 nt, Artificial Sequence
  SARM1 targeting guide sequence portion
cccaccaugggcccgugcca

SEQ ID NO: 1267 - RNA, 20 nt, Artificial Sequence
  SARM1 targeting guide sequence portion
cccaggcaccgccagccgcu

SEQ ID NO: 1268 - RNA, 20 nt, Artificial Sequence
  SARM1 targeting guide sequence portion
cccagggucugugcgacgcc

SEQ ID NO: 1269 - RNA, 20 nt, Artificial Sequence
  SARM1 targeting guide sequence portion
cccaucuggcccaggcaccg

SEQ ID NO: 1270 - RNA, 20 nt, Artificial Sequence
  SARM1 targeting guide sequence portion
ccccaucuggcccaggcacc

SEQ ID NO: 1271 - RNA, 20 nt, Artificial Sequence
  SARM1 targeting guide sequence portion
cccccaucuggcccaggcac

SEQ ID NO: 1272 - RNA, 20 nt, Artificial Sequence
  SARM1 targeting guide sequence portion
cccccggcgacacuucgcgg

SEQ ID NO: 1273 - RNA, 20 nt, Artificial Sequence
  SARM1 targeting guide sequence portion
ccccgcgaagugucgccggg

SEQ ID NO: 1274 - RNA, 20 nt, Artificial Sequence
  SARM1 targeting guide sequence portion
ccccggcgacacuucgcggg

SEQ ID NO: 1275 - RNA, 20 nt, Artificial Sequence
  SARM1 targeting guide sequence portion
cccgacauggcgaagaagcg

SEQ ID NO: 1276 - RNA, 20 nt, Artificial Sequence
  SARM1 targeting guide sequence portion
cccgccugcuucagcgcgga

SEQ ID NO: 1277 - RNA, 20 nt, Artificial Sequence
  SARM1 targeting guide sequence portion
cccgcgaagugucgccgggg

SEQ ID NO: 1278 - RNA, 20 nt, Artificial Sequence
  SARM1 targeting guide sequence portion
cccgcgcgccgcccgccugc

SEQ ID NO: 1279 - RNA, 20 nt, Artificial Sequence
  SARM1 targeting guide sequence portion
cccgcggccacccgcagccc

SEQ ID NO: 1280 - RNA, 20 nt, Artificial Sequence
  SARM1 targeting guide sequence portion
cccggccgugggcccgacau

SEQ ID NO: 1281 - RNA, 20 nt, Artificial Sequence
  SARM1 targeting guide sequence portion
cccggcgacacuucgcgggg

SEQ ID NO: 1282 - RNA, 20 nt, Artificial Sequence
  SARM1 targeting guide sequence portion
cccgugccaccgcccccauc

SEQ ID NO: 1283 - RNA, 20 nt, Artificial Sequence
  SARM1 targeting guide sequence portion
cccuggagcgcgcgcugccg

SEQ ID NO: 1284 - RNA, 20 nt, Artificial Sequence
  SARM1 targeting guide sequence portion
cccugggcuaccucgcggcc

SEQ ID NO: 1285 - RNA, 20 nt, Artificial Sequence
  SARM1 targeting guide sequence portion
ccgacauggcgaagaagcga

SEQ ID NO: 1286 - RNA, 20 nt, Artificial Sequence
  SARM1 targeting guide sequence portion
ccgagcggcuggcggugccu

SEQ ID NO: 1287 - RNA, 20 nt, Artificial Sequence
  SARM1 targeting guide sequence portion
ccgaggucuuccaacuggug

SEQ ID NO: 1288 - RNA, 20 nt, Artificial Sequence
  SARM1 targeting guide sequence portion
ccgaggugcaggacgcccug

SEQ ID NO: 1289 - RNA, 20 nt, Artificial Sequence
  SARM1 targeting guide sequence portion
ccgcaacagcaggucgaggc

SEQ ID NO: 1290 - RNA, 20 nt, Artificial Sequence
  SARM1 targeting guide sequence portion
ccgccaucgaggcggauggc

SEQ ID NO: 1291 - RNA, 20 nt, Artificial Sequence
  SARM1 targeting guide sequence portion
ccgcccccaucuggcccagg

SEQ ID NO: 1292 - RNA, 20 nt, Artificial Sequence
  SARM1 targeting guide sequence portion
ccgcccgccugcuucagcgc

SEQ ID NO: 1293 - RNA, 20 nt, Artificial Sequence
  SARM1 targeting guide sequence portion
ccgccuacaagcugugucgc

SEQ ID NO: 1294 - RNA, 20 nt, Artificial Sequence
  SARM1 targeting guide sequence portion
ccgccucgauggcggccucg

SEQ ID NO: 1295 - RNA, 20 nt, Artificial Sequence
  SARM1 targeting guide sequence portion
ccgccugcuucagcgcggac

SEQ ID NO: 1296 - RNA, 20 nt, Artificial Sequence
  SARM1 targeting guide sequence portion
ccgcgaagugucgccggggg

SEQ ID NO: 1297 - RNA, 20 nt, Artificial Sequence
  SARM1 targeting guide sequence portion
ccgcgagguagcccaggguc

SEQ ID NO: 1298 - RNA, 20 nt, Artificial Sequence
  SARM1 targeting guide sequence portion
ccgcgcgccgcccgccugcu

SEQ ID NO: 1299 - RNA, 20 nt, Artificial Sequence
  SARM1 targeting guide sequence portion
ccgcgcgccugcuggagcag

SEQ ID NO: 1300 - RNA, 20 nt, Artificial Sequence
  SARM1 targeting guide sequence portion
ccgcgcugaagcaggcgggc

SEQ ID NO: 1301 - RNA, 20 nt, Artificial Sequence
  SARM1 targeting guide sequence portion
ccgcgggccccgcgaagugu

SEQ ID NO: 1302 - RNA, 20 nt, Artificial Sequence
  SARM1 targeting guide sequence portion
ccggagcugcagcaggccuu

SEQ ID NO: 1303 - RNA, 20 nt, Artificial Sequence
  SARM1 targeting guide sequence portion
ccggaguuggagacgcgugu

SEQ ID NO: 1304 - RNA, 20 nt, Artificial Sequence
  SARM1 targeting guide sequence portion
ccggcagcgcgcgcuccagg

SEQ ID NO: 1305 - RNA, 20 nt, Artificial Sequence
  SARM1 targeting guide sequence portion
ccggccgugggcccgacaug

SEQ ID NO: 1306 - RNA, 20 nt, Artificial Sequence
  SARM1 targeting guide sequence portion
ccggccuggccgaggucuuc

SEQ ID NO: 1307 - RNA, 20 nt, Artificial Sequence
  SARM1 targeting guide sequence portion
ccggcgacacuucgcggggc

SEQ ID NO: 1308 - RNA, 20 nt, Artificial Sequence
  SARM1 targeting guide sequence portion
ccggcgccugcagcagccgc

SEQ ID NO: 1309 - RNA, 20 nt, Artificial Sequence
  SARM1 targeting guide sequence portion
ccgggggcaggcaccgaggu

SEQ ID NO: 1310 - RNA, 20 nt, Artificial Sequence
  SARM1 targeting guide sequence portion
ccgguucucagccaccagga

SEQ ID NO: 1311 - RNA, 20 nt, Artificial Sequence
  SARM1 targeting guide sequence portion
ccgugccaccgcccccaucu

SEQ ID NO: 1312 - RNA, 20 nt, Artificial Sequence
  SARM1 targeting guide sequence portion
ccgugggcccgacauggcga

SEQ ID NO: 1313 - RNA, 20 nt, Artificial Sequence
  SARM1 targeting guide sequence portion
ccgugggccgcgagguagcc

SEQ ID NO: 1314 - RNA, 20 nt, Artificial Sequence
  SARM1 targeting guide sequence portion
ccgugggcgccggccuggcc

SEQ ID NO: 1315 - RNA, 20 nt, Artificial Sequence
  SARM1 targeting guide sequence portion
ccuacaagcugugucgcuuc

SEQ ID NO: 1316 - RNA, 20 nt, Artificial Sequence
  SARM1 targeting guide sequence portion
ccuccaccaguuggaagacc

SEQ ID NO: 1317 - RNA, 20 nt, Artificial Sequence
  SARM1 targeting guide sequence portion
ccuccuccaccaguuggaag

SEQ ID NO: 1318 - RNA, 20 nt, Artificial Sequence
  SARM1 targeting guide sequence portion
ccucgaccugcuguugcggc

SEQ ID NO: 1319 - RNA, 20 nt, Artificial Sequence
  SARM1 targeting guide sequence portion
ccucgauggcggccucgacc

SEQ ID NO: 1320 - RNA, 20 nt, Artificial Sequence
  SARM1 targeting guide sequence portion
ccucgcggcccacggccggc

SEQ ID NO: 1321 - RNA, 20 nt, Artificial Sequence
  SARM1 targeting guide sequence portion
ccucggugccugcccccggc

SEQ ID NO: 1322 - RNA, 20 nt, Artificial Sequence
  SARM1 targeting guide sequence portion
ccugacgcugcuucucuccg

SEQ ID NO: 1323 - RNA, 20 nt, Artificial Sequence
  SARM1 targeting guide sequence portion
ccugcacacgcgucuccaac

SEQ ID NO: 1324 - RNA, 20 nt, Artificial Sequence
  SARM1 targeting guide sequence portion
ccugcaccucggugccugcc

SEQ ID NO: 1325 - RNA, 20 nt, Artificial Sequence
  SARM1 targeting guide sequence portion
ccugcagcagccgcaacagc

SEQ ID NO: 1326 - RNA, 20 nt, Artificial Sequence
  SARM1 targeting guide sequence portion
ccugcccccggcgacacuuc

SEQ ID NO: 1327 - RNA, 20 nt, Artificial Sequence
  SARM1 targeting guide sequence portion
ccugcugcagcuccggcagc

SEQ ID NO: 1328 - RNA, 20 nt, Artificial Sequence
  SARM1 targeting guide sequence portion
ccugcuggagcagauccugg

SEQ ID NO: 1329 - RNA, 20 nt, Artificial Sequence
  SARM1 targeting guide sequence portion
ccugcuguugcggcugcugc

SEQ ID NO: 1330 - RNA, 20 nt, Artificial Sequence
  SARM1 targeting guide sequence portion
ccugcuucagcgcggacaag

SEQ ID NO: 1331 - RNA, 20 nt, Artificial Sequence
  SARM1 targeting guide sequence portion
ccuggagcgcgcgcugccgg

SEQ ID NO: 1332 - RNA, 20 nt, Artificial Sequence
  SARM1 targeting guide sequence portion
ccuggccgaggucuuccaac

SEQ ID NO: 1333 - RNA, 20 nt, Artificial Sequence
  SARM1 targeting guide sequence portion
ccugggccagaugggggcgg

SEQ ID NO: 1334 - RNA, 20 nt, Artificial Sequence
  SARM1 targeting guide sequence portion
ccugggcuaccucgcggccc

SEQ ID NO: 1335 - RNA, 20 nt, Artificial Sequence
  SARM1 targeting guide sequence portion
ccuuguccgcgcugaagcag

SEQ ID NO: 1336 - RNA, 20 nt, Artificial Sequence
  SARM1 targeting guide sequence portion
cgaagaagcgacacagcuug

SEQ ID NO: 1337 - RNA, 20 nt, Artificial Sequence
  SARM1 targeting guide sequence portion
cgaagugucgccgggggcag

SEQ ID NO: 1338 - RNA, 20 nt, Artificial Sequence
  SARM1 targeting guide sequence portion
cgacacagcuuguaggcgga

SEQ ID NO: 1339 - RNA, 20 nt, Artificial Sequence
  SARM1 targeting guide sequence portion
cgacacuucgcggggcccgc

SEQ ID NO: 1340 - RNA, 20 nt, Artificial Sequence
  SARM1 targeting guide sequence portion
cgacauggcgaagaagcgac

SEQ ID NO: 1341 - RNA, 20 nt, Artificial Sequence
  SARM1 targeting guide sequence portion
cgaccugcuguugcggcugc

SEQ ID NO: 1342 - RNA, 20 nt, Artificial Sequence
  SARM1 targeting guide sequence portion
cgacgccauccgccucgaug

SEQ ID NO: 1343 - RNA, 20 nt, Artificial Sequence
  SARM1 targeting guide sequence portion
cgagcggcuggcggugccug

SEQ ID NO: 1344 - RNA, 20 nt, Artificial Sequence
  SARM1 targeting guide sequence portion
cgaggccgccaucgaggcgg

SEQ ID NO: 1345 - RNA, 20 nt, Artificial Sequence
  SARM1 targeting guide sequence portion
cgaggcggauggcgucgcac

SEQ ID NO: 1346 - RNA, 20 nt, Artificial Sequence
  SARM1 targeting guide sequence portion
cgagguagcccagggucugu

SEQ ID NO: 1347 - RNA, 20 nt, Artificial Sequence
  SARM1 targeting guide sequence portion
cgaggucuuccaacuggugg

SEQ ID NO: 1348 - RNA, 20 nt, Artificial Sequence
  SARM1 targeting guide sequence portion
cgaggugcaggacgcccugg

SEQ ID NO: 1349 - RNA, 20 nt, Artificial Sequence
  SARM1 targeting guide sequence portion
cgauggcggccucgaccugc

SEQ ID NO: 1350 - RNA, 20 nt, Artificial Sequence
  SARM1 targeting guide sequence portion
cgcaacagcaggucgaggcc

SEQ ID NO: 1351 - RNA, 20 nt, Artificial Sequence
  SARM1 targeting guide sequence portion
cgcacagacccugggcuacc

SEQ ID NO: 1352 - RNA, 20 nt, Artificial Sequence
  SARM1 targeting guide sequence portion
cgccauccgccucgauggcg

SEQ ID NO: 1353 - RNA, 20 nt, Artificial Sequence
  SARM1 targeting guide sequence portion
cgccaucgaggcggauggcg

SEQ ID NO: 1354 - RNA, 20 nt, Artificial Sequence
  SARM1 targeting guide sequence portion
cgccaugucgggcccacggc

SEQ ID NO: 1355 - RNA, 20 nt, Artificial Sequence
  SARM1 targeting guide sequence portion
cgcccccaucuggcccaggc

SEQ ID NO: 1356 - RNA, 20 nt, Artificial Sequence
  SARM1 targeting guide sequence portion
cgcccgccugcuucagcgcg

SEQ ID NO: 1357 - RNA, 20 nt, Artificial Sequence
  SARM1 targeting guide sequence portion
cgcccggccgugggcccgac

SEQ ID NO: 1358 - RNA, 20 nt, Artificial Sequence
  SARM1 targeting guide sequence portion
cgcccuggagcgcgcgcugc

SEQ ID NO: 1359 - RNA, 20 nt, Artificial Sequence
  SARM1 targeting guide sequence portion
cgccgagcggcuggcggugc

SEQ ID NO: 1360 - RNA, 20 nt, Artificial Sequence
  SARM1 targeting guide sequence portion
cgccgcccgccugcuucagc

SEQ ID NO: 1361 - RNA, 20 nt, Artificial Sequence
  SARM1 targeting guide sequence portion
cgccggaguuggagacgcgu

SEQ ID NO: 1362 - RNA, 20 nt, Artificial Sequence
  SARM1 targeting guide sequence portion
cgccggccuggccgaggucu

SEQ ID NO: 1363 - RNA, 20 nt, Artificial Sequence
  SARM1 targeting guide sequence portion
cgccgggggcaggcaccgag

SEQ ID NO: 1364 - RNA, 20 nt, Artificial Sequence
  SARM1 targeting guide sequence portion
cgccuacaagcugugucgcu

SEQ ID NO: 1365 - RNA, 20 nt, Artificial Sequence
  SARM1 targeting guide sequence portion
cgccucgauggcggccucga

SEQ ID NO: 1366 - RNA, 20 nt, Artificial Sequence
  SARM1 targeting guide sequence portion
cgccugcagcagccgcaaca

SEQ ID NO: 1367 - RNA, 20 nt, Artificial Sequence
  SARM1 targeting guide sequence portion
cgccugcuggagcagauccu

SEQ ID NO: 1368 - RNA, 20 nt, Artificial Sequence
  SARM1 targeting guide sequence portion
cgccugcuucagcgcggaca

SEQ ID NO: 1369 - RNA, 20 nt, Artificial Sequence
  SARM1 targeting guide sequence portion
cgcgaagugucgccgggggc

SEQ ID NO: 1370 - RNA, 20 nt, Artificial Sequence
  SARM1 targeting guide sequence portion
cgcgagguagcccagggucu

SEQ ID NO: 1371 - RNA, 20 nt, Artificial Sequence
  SARM1 targeting guide sequence portion
cgcgccgcccgccugcuuca

SEQ ID NO: 1372 - RNA, 20 nt, Artificial Sequence
  SARM1 targeting guide sequence portion
cgcgccugcuggagcagauc

SEQ ID NO: 1373 - RNA, 20 nt, Artificial Sequence
  SARM1 targeting guide sequence portion
cgcgcgccgcccgccugcuu

SEQ ID NO: 1374 - RNA, 20 nt, Artificial Sequence
  SARM1 targeting guide sequence portion
cgcgcgccugcuggagcaga

SEQ ID NO: 1375 - RNA, 20 nt, Artificial Sequence
  SARM1 targeting guide sequence portion
cgcgcgcuccagggcguccu

SEQ ID NO: 1376 - RNA, 20 nt, Artificial Sequence
  SARM1 targeting guide sequence portion
cgcgcgcugccggagcugca

SEQ ID NO: 1377 - RNA, 20 nt, Artificial Sequence
  SARM1 targeting guide sequence portion
cgcgcggccugcacacgcgu

SEQ ID NO: 1378 - RNA, 20 nt, Artificial Sequence
  SARM1 targeting guide sequence portion
cgcgcuccagggcguccugc

SEQ ID NO: 1379 - RNA, 20 nt, Artificial Sequence
  SARM1 targeting guide sequence portion
cgcgcugaagcaggcgggcg

SEQ ID NO: 1380 - RNA, 20 nt, Artificial Sequence
  SARM1 targeting guide sequence portion
cgcgcugccggagcugcagc

SEQ ID NO: 1381 - RNA, 20 nt, Artificial Sequence
  SARM1 targeting guide sequence portion
cgcggacaaggccugcugca

SEQ ID NO: 1382 - RNA, 20 nt, Artificial Sequence
  SARM1 targeting guide sequence portion
cgcggcccacggccggcagc

SEQ ID NO: 1383 - RNA, 20 nt, Artificial Sequence
  SARM1 targeting guide sequence portion
cgcggccugcacacgcgucu

SEQ ID NO: 1384 - RNA, 20 nt, Artificial Sequence
  SARM1 targeting guide sequence portion
cgcgggccccgcgaaguguc

SEQ ID NO: 1385 - RNA, 20 nt, Artificial Sequence
  SARM1 targeting guide sequence portion
cgcgucuccaacuccggcgc

SEQ ID NO: 1386 - RNA, 20 nt, Artificial Sequence
  SARM1 targeting guide sequence portion
cgcgugugcaggccgcgcgc

SEQ ID NO: 1387 - RNA, 20 nt, Artificial Sequence
  SARM1 targeting guide sequence portion
cgcucaccgguucucagcca

SEQ ID NO: 1388 - RNA, 20 nt, Artificial Sequence
  SARM1 targeting guide sequence portion
cgcuccagggcguccugcac

SEQ ID NO: 1389 - RNA, 20 nt, Artificial Sequence
  SARM1 targeting guide sequence portion
cgcugaagcaggcgggcggc

SEQ ID NO: 1390 - RNA, 20 nt, Artificial Sequence
  SARM1 targeting guide sequence portion
cgcugccggagcugcagcag

SEQ ID NO: 1391 - RNA, 20 nt, Artificial Sequence
  SARM1 targeting guide sequence portion
cgcugcuucucuccgccuac

SEQ ID NO: 1392 - RNA, 20 nt, Artificial Sequence
  SARM1 targeting guide sequence portion
cgcuucuucgccaugucggg

SEQ ID NO: 1393 - RNA, 20 nt, Artificial Sequence
  SARM1 targeting guide sequence portion
cggacaaggccugcugcagc

SEQ ID NO: 1394 - RNA, 20 nt, Artificial Sequence
  SARM1 targeting guide sequence portion
cggagcugcagcaggccuug

SEQ ID NO: 1395 - RNA, 20 nt, Artificial Sequence
  SARM1 targeting guide sequence portion
cggaguuggagacgcgugug

SEQ ID NO: 1396 - RNA, 20 nt, Artificial Sequence
  SARM1 targeting guide sequence portion
cggauggcgucgcacagacc

SEQ ID NO: 1397 - RNA, 20 nt, Artificial Sequence
  SARM1 targeting guide sequence portion
cggcagcgcgcgcuccaggg

SEQ ID NO: 1398 - RNA, 20 nt, Artificial Sequence
  SARM1 targeting guide sequence portion
cggccgugggcccgacaugg

SEQ ID NO: 1399 - RNA, 20 nt, Artificial Sequence
  SARM1 targeting guide sequence portion
cggccucgaccugcuguugc

SEQ ID NO: 1400 - RNA, 20 nt, Artificial Sequence
  SARM1 targeting guide sequence portion
cggccugcacacgcgucucc

SEQ ID NO: 1401 - RNA, 20 nt, Artificial Sequence
  SARM1 targeting guide sequence portion
cggccuggccgaggucuucc

SEQ ID NO: 1402 - RNA, 20 nt, Artificial Sequence
  SARM1 targeting guide sequence portion
cggcgacacuucgcggggcc

SEQ ID NO: 1403 - RNA, 20 nt, Artificial Sequence
  SARM1 targeting guide sequence portion
cggcgcccggccgugggccc

SEQ ID NO: 1404 - RNA, 20 nt, Artificial Sequence
  SARM1 targeting guide sequence portion
cggcgccugcagcagccgca

SEQ ID NO: 1405 - RNA, 20 nt, Artificial Sequence
  SARM1 targeting guide sequence portion
cggcugcugcaggcgccgga

SEQ ID NO: 1406 - RNA, 20 nt, Artificial Sequence
  SARM1 targeting guide sequence portion
cggcuggcggugccugggcc

SEQ ID NO: 1407 - RNA, 20 nt, Artificial Sequence
  SARM1 targeting guide sequence portion
cgggccccgcgaagugucgc

SEQ ID NO: 1408 - RNA, 20 nt, Artificial Sequence
  SARM1 targeting guide sequence portion
cgggcgccgagcggcuggcg

SEQ ID NO: 1409 - RNA, 20 nt, Artificial Sequence
  SARM1 targeting guide sequence portion
cgggggcaggcaccgaggug

SEQ ID NO: 1410 - RNA, 20 nt, Artificial Sequence
  SARM1 targeting guide sequence portion
cggguggccgcgggccccgc

SEQ ID NO: 1411 - RNA, 20 nt, Artificial Sequence
  SARM1 targeting guide sequence portion
cggugccugcccccggcgac

SEQ ID NO: 1412 - RNA, 20 nt, Artificial Sequence
  SARM1 targeting guide sequence portion
cggugccugggccagauggg

SEQ ID NO: 1413 - RNA, 20 nt, Artificial Sequence
  SARM1 targeting guide sequence portion
cgguucucagccaccaggau

SEQ ID NO: 1414 - RNA, 20 nt, Artificial Sequence
  SARM1 targeting guide sequence portion
cguccugcaccucggugccu

SEQ ID NO: 1415 - RNA, 20 nt, Artificial Sequence
  SARM1 targeting guide sequence portion
cgucgcacagacccugggcu

SEQ ID NO: 1416 - RNA, 20 nt, Artificial Sequence
  SARM1 targeting guide sequence portion
cgucuccaacuccggcgccu

SEQ ID NO: 1417 - RNA, 20 nt, Artificial Sequence
  SARM1 targeting guide sequence portion
cgugccaccgcccccaucug

SEQ ID NO: 1418 - RNA, 20 nt, Artificial Sequence
  SARM1 targeting guide sequence portion
cgugggcccgacauggcgaa

SEQ ID NO: 1419 - RNA, 20 nt, Artificial Sequence
  SARM1 targeting guide sequence portion
cgugggccgcgagguagccc

SEQ ID NO: 1420 - RNA, 20 nt, Artificial Sequence
  SARM1 targeting guide sequence portion
cgugggcgccggccuggccg

SEQ ID NO: 1421 - RNA, 20 nt, Artificial Sequence
  SARM1 targeting guide sequence portion
cgugugcaggccgcgcgccu

SEQ ID NO: 1422 - RNA, 20 nt, Artificial Sequence
  SARM1 targeting guide sequence portion
cuacaagcugugucgcuucu

SEQ ID NO: 1423 - RNA, 20 nt, Artificial Sequence
  SARM1 targeting guide sequence portion
cucaccgguucucagccacc

SEQ ID NO: 1424 - RNA, 20 nt, Artificial Sequence
  SARM1 targeting guide sequence portion
cucagccaccaggaucugcu

SEQ ID NO: 1425 - RNA, 20 nt, Artificial Sequence
  SARM1 targeting guide sequence portion
cuccaacuccggcgccugca

SEQ ID NO: 1426 - RNA, 20 nt, Artificial Sequence
  SARM1 targeting guide sequence portion
cuccaccaguuggaagaccu

SEQ ID NO: 1427 - RNA, 20 nt, Artificial Sequence
  SARM1 targeting guide sequence portion
cuccagcaggcgcgcggccu

SEQ ID NO: 1428 - RNA, 20 nt, Artificial Sequence
  SARM1 targeting guide sequence portion
cuccagggcguccugcaccu

SEQ ID NO: 1429 - RNA, 20 nt, Artificial Sequence
  SARM1 targeting guide sequence portion
cuccgccuacaagcuguguc

SEQ ID NO: 1430 - RNA, 20 nt, Artificial Sequence
  SARM1 targeting guide sequence portion
cuccggcagcgcgcgcucca

SEQ ID NO: 1431 - RNA, 20 nt, Artificial Sequence
  SARM1 targeting guide sequence portion
cuccggcgccugcagcagcc

SEQ ID NO: 1432 - RNA, 20 nt, Artificial Sequence
  SARM1 targeting guide sequence portion
cuccuccaccaguuggaaga

SEQ ID NO: 1433 - RNA, 20 nt, Artificial Sequence
  SARM1 targeting guide sequence portion
cucgaccugcuguugcggcu

SEQ ID NO: 1434 - RNA, 20 nt, Artificial Sequence
  SARM1 targeting guide sequence portion
cucgauggcggccucgaccu

SEQ ID NO: 1435 - RNA, 20 nt, Artificial Sequence
  SARM1 targeting guide sequence portion
cucggcgcccggccgugggc

SEQ ID NO: 1436 - RNA, 20 nt, Artificial Sequence
  SARM1 targeting guide sequence portion
cucggugccugcccccggcg

SEQ ID NO: 1437 - RNA, 20 nt, Artificial Sequence
  SARM1 targeting guide sequence portion
cucuccgccuacaagcugug

SEQ ID NO: 1438 - RNA, 20 nt, Artificial Sequence
  SARM1 targeting guide sequence portion
cugaagcaggcgggcggcgc

SEQ ID NO: 1439 - RNA, 20 nt, Artificial Sequence
  SARM1 targeting guide sequence portion
cugacgcugcuucucuccgc

SEQ ID NO: 1440 - RNA, 20 nt, Artificial Sequence
  SARM1 targeting guide sequence portion
cugcacacgcgucuccaacu

SEQ ID NO: 1441 - RNA, 20 nt, Artificial Sequence
  SARM1 targeting guide sequence portion
cugcaccucggugccugccc

SEQ ID NO: 1442 - RNA, 20 nt, Artificial Sequence
  SARM1 targeting guide sequence portion
cugcagcagccgcaacagca

SEQ ID NO: 1443 - RNA, 20 nt, Artificial Sequence
  SARM1 targeting guide sequence portion
cugcagcaggccuuguccgc

SEQ ID NO: 1444 - RNA, 20 nt, Artificial Sequence
  SARM1 targeting guide sequence portion
cugcagcuccggcagcgcgc

SEQ ID NO: 1445 - RNA, 20 nt, Artificial Sequence
  SARM1 targeting guide sequence portion
cugcaggcgccggaguugga

SEQ ID NO: 1446 - RNA, 20 nt, Artificial Sequence
  SARM1 targeting guide sequence portion
cugcccccggcgacacuucg

SEQ ID NO: 1447 - RNA, 20 nt, Artificial Sequence
  SARM1 targeting guide sequence portion
cugccggagcugcagcaggc

SEQ ID NO: 1448 - RNA, 20 nt, Artificial Sequence
  SARM1 targeting guide sequence portion
cugcggguggccgcgggccc

SEQ ID NO: 1449 - RNA, 20 nt, Artificial Sequence
  SARM1 targeting guide sequence portion
cugcuccagcaggcgcgcgg

SEQ ID NO: 1450 - RNA, 20 nt, Artificial Sequence
  SARM1 targeting guide sequence portion
cugcugcagcuccggcagcg

SEQ ID NO: 1451 - RNA, 20 nt, Artificial Sequence
  SARM1 targeting guide sequence portion
cugcugcaggcgccggaguu

SEQ ID NO: 1452 - RNA, 20 nt, Artificial Sequence
  SARM1 targeting guide sequence portion
cugcuggagcagauccuggu

SEQ ID NO: 1453 - RNA, 20 nt, Artificial Sequence
  SARM1 targeting guide sequence portion
cugcuguugcggcugcugca

SEQ ID NO: 1454 - RNA, 20 nt, Artificial Sequence
  SARM1 targeting guide sequence portion
cugcuucagcgcggacaagg

SEQ ID NO: 1455 - RNA, 20 nt, Artificial Sequence
  SARM1 targeting guide sequence portion
cugcuucucuccgccuacaa

SEQ ID NO: 1456 - RNA, 20 nt, Artificial Sequence
  SARM1 targeting guide sequence portion
cuggagcagauccugguggc

SEQ ID NO: 1457 - RNA, 20 nt, Artificial Sequence
  SARM1 targeting guide sequence portion
cuggagcgcgcgcugccgga

SEQ ID NO: 1458 - RNA, 20 nt, Artificial Sequence
  SARM1 targeting guide sequence portion
cuggcccaggcaccgccagc

SEQ ID NO: 1459 - RNA, 20 nt, Artificial Sequence
  SARM1 targeting guide sequence portion
cuggccgaggucuuccaacu

SEQ ID NO: 1460 - RNA, 20 nt, Artificial Sequence
  SARM1 targeting guide sequence portion
cuggcggugccugggccaga

SEQ ID NO: 1461 - RNA, 20 nt, Artificial Sequence
  SARM1 targeting guide sequence portion
cugggccagaugggggcggu

SEQ ID NO: 1462 - RNA, 20 nt, Artificial Sequence
  SARM1 targeting guide sequence portion
cugugcgacgccauccgccu

SEQ ID NO: 1463 - RNA, 20 nt, Artificial Sequence
  SARM1 targeting guide sequence portion
cugugucgcuucuucgccau

SEQ ID NO: 1464 - RNA, 20 nt, Artificial Sequence
  SARM1 targeting guide sequence portion
cuguugcggcugcugcaggc

SEQ ID NO: 1465 - RNA, 20 nt, Artificial Sequence
  SARM1 targeting guide sequence portion
cuucagcgcggacaaggccu

SEQ ID NO: 1466 - RNA, 20 nt, Artificial Sequence
  SARM1 targeting guide sequence portion
cuuccaacugguggaggagg

SEQ ID NO: 1467 - RNA, 20 nt, Artificial Sequence
  SARM1 targeting guide sequence portion
cuucgccaugucgggcccac

SEQ ID NO: 1468 - RNA, 20 nt, Artificial Sequence
  SARM1 targeting guide sequence portion
cuucucuccgccuacaagcu

SEQ ID NO: 1469 - RNA, 20 nt, Artificial Sequence
  SARM1 targeting guide sequence portion
cuucuucgccaugucgggcc

SEQ ID NO: 1470 - RNA, 20 nt, Artificial Sequence
  SARM1 targeting guide sequence portion
cuuguaggcggagagaagca

SEQ ID NO: 1471 - RNA, 20 nt, Artificial Sequence
  SARM1 targeting guide sequence portion
cuuguccgcgcugaagcagg

SEQ ID NO: 1472 - RNA, 20 nt, Artificial Sequence
  SARM1 targeting guide sequence portion
gaagaagcgacacagcuugu

SEQ ID NO: 1473 - RNA, 20 nt, Artificial Sequence
  SARM1 targeting guide sequence portion
gaagaccucggccaggccgg

SEQ ID NO: 1474 - RNA, 20 nt, Artificial Sequence
  SARM1 targeting guide sequence portion
gaagcgacacagcuuguagg

SEQ ID NO: 1475 - RNA, 20 nt, Artificial Sequence
  SARM1 targeting guide sequence portion
gaagugucgccgggggcagg

SEQ ID NO: 1476 - RNA, 20 nt, Artificial Sequence
  SARM1 targeting guide sequence portion
gacaaggccugcugcagcuc

SEQ ID NO: 1477 - RNA, 20 nt, Artificial Sequence
  SARM1 targeting guide sequence portion
gacacagcuuguaggcggag

SEQ ID NO: 1478 - RNA, 20 nt, Artificial Sequence
  SARM1 targeting guide sequence portion
gacacuucgcggggcccgcg

SEQ ID NO: 1479 - RNA, 20 nt, Artificial Sequence
  SARM1 targeting guide sequence portion
gacauggcgaagaagcgaca

SEQ ID NO: 1480 - RNA, 20 nt, Artificial Sequence
  SARM1 targeting guide sequence portion
gacccugggcuaccucgcgg

SEQ ID NO: 1481 - RNA, 20 nt, Artificial Sequence
  SARM1 targeting guide sequence portion
gaccucggccaggccggcgc

SEQ ID NO: 1482 - RNA, 20 nt, Artificial Sequence
  SARM1 targeting guide sequence portion
gaccugcuguugcggcugcu

SEQ ID NO: 1483 - RNA, 20 nt, Artificial Sequence
  SARM1 targeting guide sequence portion
gacgccauccgccucgaugg

SEQ ID NO: 1484 - RNA, 20 nt, Artificial Sequence
  SARM1 targeting guide sequence portion
gacgcccuggagcgcgcgcu

SEQ ID NO: 1485 - RNA, 20 nt, Artificial Sequence
  SARM1 targeting guide sequence portion
gacgcgugugcaggccgcgc

SEQ ID NO: 1486 - RNA, 20 nt, Artificial Sequence
  SARM1 targeting guide sequence portion
gacgcugcuucucuccgccu

SEQ ID NO: 1487 - RNA, 20 nt, Artificial Sequence
  SARM1 targeting guide sequence portion
gagacgcgugugcaggccgc

SEQ ID NO: 1488 - RNA, 20 nt, Artificial Sequence
  SARM1 targeting guide sequence portion
gagcagauccugguggcuga

SEQ ID NO: 1489 - RNA, 20 nt, Artificial Sequence
  SARM1 targeting guide sequence portion
gagcgcgcgcugccggagcu

SEQ ID NO: 1490 - RNA, 20 nt, Artificial Sequence
  SARM1 targeting guide sequence portion
gagcggcuggcggugccugg

SEQ ID NO: 1491 - RNA, 20 nt, Artificial Sequence
  SARM1 targeting guide sequence portion
gagcugcagcaggccuuguc

SEQ ID NO: 1492 - RNA, 20 nt, Artificial Sequence
  SARM1 targeting guide sequence portion
gaggccgccaucgaggcgga

SEQ ID NO: 1493 - RNA, 20 nt, Artificial Sequence
  SARM1 targeting guide sequence portion
gaggcggauggcgucgcaca

SEQ ID NO: 1494 - RNA, 20 nt, Artificial Sequence
  SARM1 targeting guide sequence portion
gagguagcccagggucugug

SEQ ID NO: 1495 - RNA, 20 nt, Artificial Sequence
  SARM1 targeting guide sequence portion
gaggucuuccaacuggugga

SEQ ID NO: 1496 - RNA, 20 nt, Artificial Sequence
  SARM1 targeting guide sequence portion
gaggugcaggacgcccugga

SEQ ID NO: 1497 - RNA, 20 nt, Artificial Sequence
  SARM1 targeting guide sequence portion
gaguuggagacgcgugugca

SEQ ID NO: 1498 - RNA, 20 nt, Artificial Sequence
  SARM1 targeting guide sequence portion
gauccugguggcugagaacc

SEQ ID NO: 1499 - RNA, 20 nt, Artificial Sequence
  SARM1 targeting guide sequence portion
gaucugcuccagcaggcgcg

SEQ ID NO: 1500 - RNA, 20 nt, Artificial Sequence
  SARM1 targeting guide sequence portion
gauggcggccucgaccugcu

SEQ ID NO: 1501 - RNA, 20 nt, Artificial Sequence
  SARM1 targeting guide sequence portion
gauggcgucgcacagacccu

SEQ ID NO: 1502 - RNA, 20 nt, Artificial Sequence
  SARM1 targeting guide sequence portion
gaugggggcgguggcacggg

SEQ ID NO: 1503 - RNA, 20 nt, Artificial Sequence
  SARM1 targeting guide sequence portion
gcaacagcaggucgaggccg

SEQ ID NO: 1504 - RNA, 20 nt, Artificial Sequence
  SARM1 targeting guide sequence portion
gcacacgcgucuccaacucc

SEQ ID NO: 1505 - RNA, 20 nt, Artificial Sequence
  SARM1 targeting guide sequence portion
gcacagacccugggcuaccu

SEQ ID NO: 1506 - RNA, 20 nt, Artificial Sequence
  SARM1 targeting guide sequence portion
gcaccgaggugcaggacgcc

SEQ ID NO: 1507 - RNA, 20 nt, Artificial Sequence
  SARM1 targeting guide sequence portion
gcaccucggugccugccccc

SEQ ID NO: 1508 - RNA, 20 nt, Artificial Sequence
  SARM1 targeting guide sequence portion
gcagauccugguggcugaga

SEQ ID NO: 1509 - RNA, 20 nt, Artificial Sequence
  SARM1 targeting guide sequence portion
gcagcagccaggccuccucc

SEQ ID NO: 1510 - RNA, 20 nt, Artificial Sequence
  SARM1 targeting guide sequence portion
gcagcagccgcaacagcagg

SEQ ID NO: 1511 - RNA, 20 nt, Artificial Sequence
  SARM1 targeting guide sequence portion
gcagcaggccuuguccgcgc

SEQ ID NO: 1512 - RNA, 20 nt, Artificial Sequence
  SARM1 targeting guide sequence portion
gcagccaggccuccuccacc

SEQ ID NO: 1513 - RNA, 20 nt, Artificial Sequence
  SARM1 targeting guide sequence portion
gcagccgcaacagcaggucg

SEQ ID NO: 1514 - RNA, 20 nt, Artificial Sequence
  SARM1 targeting guide sequence portion
gcagcgcgcgcuccagggcg

SEQ ID NO: 1515 - RNA, 20 nt, Artificial Sequence
  SARM1 targeting guide sequence portion
gcagcuccggcagcgcgcgc

SEQ ID NO: 1516 - RNA, 20 nt, Artificial Sequence
  SARM1 targeting guide sequence portion
gcaggacgcccuggagcgcg

SEQ ID NO: 1517 - RNA, 20 nt, Artificial Sequence
  SARM1 targeting guide sequence portion
gcaggcaccgaggugcagga

SEQ ID NO: 1518 - RNA, 20 nt, Artificial Sequence
  SARM1 targeting guide sequence portion
gcaggccgcgcgccugcugg

SEQ ID NO: 1519 - RNA, 20 nt, Artificial Sequence
  SARM1 targeting guide sequence portion
gcaggccuuguccgcgcuga

SEQ ID NO: 1520 - RNA, 20 nt, Artificial Sequence
  SARM1 targeting guide sequence portion
gcaggcgccggaguuggaga

SEQ ID NO: 1521 - RNA, 20 nt, Artificial Sequence
  SARM1 targeting guide sequence portion
gcaggcgcgcggccugcaca

SEQ ID NO: 1522 - RNA, 20 nt, Artificial Sequence
  SARM1 targeting guide sequence portion
gcaggucgaggccgccaucg

SEQ ID NO: 1523 - RNA, 20 nt, Artificial Sequence
  SARM1 targeting guide sequence portion
gccaccaggaucugcuccag

SEQ ID NO: 1524 - RNA, 20 nt, Artificial Sequence
  SARM1 targeting guide sequence portion
gccaccgcccccaucuggcc

SEQ ID NO: 1525 - RNA, 20 nt, Artificial Sequence
  SARM1 targeting guide sequence portion
gccagaugggggcgguggca

SEQ ID NO: 1526 - RNA, 20 nt, Artificial Sequence
  SARM1 targeting guide sequence portion
gccaggccuccuccaccagu

SEQ ID NO: 1527 - RNA, 20 nt, Artificial Sequence
  SARM1 targeting guide sequence portion
gccauccgccucgauggcgg

SEQ ID NO: 1528 - RNA, 20 nt, Artificial Sequence
  SARM1 targeting guide sequence portion
gccaucgaggcggauggcgu

SEQ ID NO: 1529 - RNA, 20 nt, Artificial Sequence
  SARM1 targeting guide sequence portion
gccaugucgggcccacggcc

SEQ ID NO: 1530 - RNA, 20 nt, Artificial Sequence
  SARM1 targeting guide sequence portion
gcccaccaugggcccgugcc

SEQ ID NO: 1531 - RNA, 20 nt, Artificial Sequence
  SARM1 targeting guide sequence portion
gcccaggcaccgccagccgc

SEQ ID NO: 1532 - RNA, 20 nt, Artificial Sequence
  SARM1 targeting guide sequence portion
gcccagggucugugcgacgc

SEQ ID NO: 1533 - RNA, 20 nt, Artificial Sequence
  SARM1 targeting guide sequence portion
gcccccaucuggcccaggca

SEQ ID NO: 1534 - RNA, 20 nt, Artificial Sequence
  SARM1 targeting guide sequence portion
gcccccggcgacacuucgcg

SEQ ID NO: 1535 - RNA, 20 nt, Artificial Sequence
  SARM1 targeting guide sequence portion
gccccgcgaagugucgccgg

SEQ ID NO: 1536 - RNA, 20 nt, Artificial Sequence
  SARM1 targeting guide sequence portion
gcccgacauggcgaagaagc

SEQ ID NO: 1537 - RNA, 20 nt, Artificial Sequence
  SARM1 targeting guide sequence portion
gcccgccugcuucagcgcgg

SEQ ID NO: 1538 - RNA, 20 nt, Artificial Sequence
  SARM1 targeting guide sequence portion
gcccgcgcgccgcccgccug

SEQ ID NO: 1539 - RNA, 20 nt, Artificial Sequence
  SARM1 targeting guide sequence portion
gcccgcggccacccgcagcc

SEQ ID NO: 1540 - RNA, 20 nt, Artificial Sequence
  SARM1 targeting guide sequence portion
gcccggccgugggcccgaca

SEQ ID NO: 1541 - RNA, 20 nt, Artificial Sequence
  SARM1 targeting guide sequence portion
gcccgugccaccgcccccau

SEQ ID NO: 1542 - RNA, 20 nt, Artificial Sequence
  SARM1 targeting guide sequence portion
gcccuggagcgcgcgcugcc

SEQ ID NO: 1543 - RNA, 20 nt, Artificial Sequence
  SARM1 targeting guide sequence portion
gccgagcggcuggcggugcc

SEQ ID NO: 1544 - RNA, 20 nt, Artificial Sequence
  SARM1 targeting guide sequence portion
gccgaggucuuccaacuggu

SEQ ID NO: 1545 - RNA, 20 nt, Artificial Sequence
  SARM1 targeting guide sequence portion
gccgcaacagcaggucgagg

SEQ ID NO: 1546 - RNA, 20 nt, Artificial Sequence
  SARM1 targeting guide sequence portion
gccgccaucgaggcggaugg

SEQ ID NO: 1547 - RNA, 20 nt, Artificial Sequence
  SARM1 targeting guide sequence portion
gccgcccgccugcuucagcg

SEQ ID NO: 1548 - RNA, 20 nt, Artificial Sequence
  SARM1 targeting guide sequence portion
gccgcgagguagcccagggu

SEQ ID NO: 1549 - RNA, 20 nt, Artificial Sequence
  SARM1 targeting guide sequence portion
gccgcgcgccugcuggagca

SEQ ID NO: 1550 - RNA, 20 nt, Artificial Sequence
  SARM1 targeting guide sequence portion
gccgcgggccccgcgaagug

SEQ ID NO: 1551 - RNA, 20 nt, Artificial Sequence
  SARM1 targeting guide sequence portion
gccggagcugcagcaggccu

SEQ ID NO: 1552 - RNA, 20 nt, Artificial Sequence
  SARM1 targeting guide sequence portion
gccggaguuggagacgcgug

SEQ ID NO: 1553 - RNA, 20 nt, Artificial Sequence
  SARM1 targeting guide sequence portion
gccggccgugggccgcgagg

SEQ ID NO: 1554 - RNA, 20 nt, Artificial Sequence
  SARM1 targeting guide sequence portion
gccggccuggccgaggucuu

SEQ ID NO: 1555 - RNA, 20 nt, Artificial Sequence
  SARM1 targeting guide sequence portion
gccgggggcaggcaccgagg

SEQ ID NO: 1556 - RNA, 20 nt, Artificial Sequence
  SARM1 targeting guide sequence portion
gccgugggcccgacauggcg

SEQ ID NO: 1557 - RNA, 20 nt, Artificial Sequence
  SARM1 targeting guide sequence portion
gccgugggccgcgagguagc

SEQ ID NO: 1558 - RNA, 20 nt, Artificial Sequence
  SARM1 targeting guide sequence portion
gccgugggcgccggccuggc

SEQ ID NO: 1559 - RNA, 20 nt, Artificial Sequence
  SARM1 targeting guide sequence portion
gccuacaagcugugucgcuu

SEQ ID NO: 1560 - RNA, 20 nt, Artificial Sequence
  SARM1 targeting guide sequence portion
gccuccuccaccaguuggaa

SEQ ID NO: 1561 - RNA, 20 nt, Artificial Sequence
  SARM1 targeting guide sequence portion
gccucgaccugcuguugcgg

SEQ ID NO: 1562 - RNA, 20 nt, Artificial Sequence
  SARM1 targeting guide sequence portion
gccucgauggcggccucgac

SEQ ID NO: 1563 - RNA, 20 nt, Artificial Sequence
  SARM1 targeting guide sequence portion
gccugcacacgcgucuccaa

SEQ ID NO: 1564 - RNA, 20 nt, Artificial Sequence
  SARM1 targeting guide sequence portion
gccugcagcagccgcaacag

SEQ ID NO: 1565 - RNA, 20 nt, Artificial Sequence
  SARM1 targeting guide sequence portion
gccugcccccggcgacacuu

SEQ ID NO: 1566 - RNA, 20 nt, Artificial Sequence
  SARM1 targeting guide sequence portion
gccugcugcagcuccggcag

SEQ ID NO: 1567 - RNA, 20 nt, Artificial Sequence
  SARM1 targeting guide sequence portion
gccugcuggagcagauccug

SEQ ID NO: 1568 - RNA, 20 nt, Artificial Sequence
  SARM1 targeting guide sequence portion
gccugcuucagcgcggacaa

SEQ ID NO: 1569 - RNA, 20 nt, Artificial Sequence
  SARM1 targeting guide sequence portion
gccuggccgaggucuuccaa

SEQ ID NO: 1570 - RNA, 20 nt, Artificial Sequence
  SARM1 targeting guide sequence portion
gccugggccagaugggggcg

SEQ ID NO: 1571 - RNA, 20 nt, Artificial Sequence
  SARM1 targeting guide sequence portion
gccuuguccgcgcugaagca

SEQ ID NO: 1572 - RNA, 20 nt, Artificial Sequence
  SARM1 targeting guide sequence portion
gcgaagaagcgacacagcuu

SEQ ID NO: 1573 - RNA, 20 nt, Artificial Sequence
  SARM1 targeting guide sequence portion
gcgaagugucgccgggggca

SEQ ID NO: 1574 - RNA, 20 nt, Artificial Sequence
  SARM1 targeting guide sequence portion
gcgacacagcuuguaggcgg

SEQ ID NO: 1575 - RNA, 20 nt, Artificial Sequence
  SARM1 targeting guide sequence portion
gcgacacuucgcggggcccg

SEQ ID NO: 1576 - RNA, 20 nt, Artificial Sequence
  SARM1 targeting guide sequence portion
gcgacgccauccgccucgau

SEQ ID NO: 1577 - RNA, 20 nt, Artificial Sequence
  SARM1 targeting guide sequence portion
gcgagguagcccagggucug

SEQ ID NO: 1578 - RNA, 20 nt, Artificial Sequence
  SARM1 targeting guide sequence portion
gcgcccggccgugggcccga

SEQ ID NO: 1579 - RNA, 20 nt, Artificial Sequence
  SARM1 targeting guide sequence portion
gcgccgagcggcuggcggug

SEQ ID NO: 1580 - RNA, 20 nt, Artificial Sequence
  SARM1 targeting guide sequence portion
gcgccgcccgccugcuucag

SEQ ID NO: 1581 - RNA, 20 nt, Artificial Sequence
  SARM1 targeting guide sequence portion
gcgccggaguuggagacgcg

SEQ ID NO: 1582 - RNA, 20 nt, Artificial Sequence
  SARM1 targeting guide sequence portion
gcgccggccuggccgagguc

SEQ ID NO: 1583 - RNA, 20 nt, Artificial Sequence
  SARM1 targeting guide sequence portion
gcgccugcagcagccgcaac

SEQ ID NO: 1584 - RNA, 20 nt, Artificial Sequence
  SARM1 targeting guide sequence portion
gcgccugcuggagcagaucc

SEQ ID NO: 1585 - RNA, 20 nt, Artificial Sequence
  SARM1 targeting guide sequence portion
gcgcgccgcccgccugcuuc

SEQ ID NO: 1586 - RNA, 20 nt, Artificial Sequence
  SARM1 targeting guide sequence portion
gcgcgccugcuggagcagau

SEQ ID NO: 1587 - RNA, 20 nt, Artificial Sequence
  SARM1 targeting guide sequence portion
gcgcgcgcuccagggcgucc

SEQ ID NO: 1588 - RNA, 20 nt, Artificial Sequence
  SARM1 targeting guide sequence portion
gcgcgcgcugccggagcugc

SEQ ID NO: 1589 - RNA, 20 nt, Artificial Sequence
  SARM1 targeting guide sequence portion
gcgcgcggccugcacacgcg

SEQ ID NO: 1590 - RNA, 20 nt, Artificial Sequence
  SARM1 targeting guide sequence portion
gcgcgcuccagggcguccug

SEQ ID NO: 1591 - RNA, 20 nt, Artificial Sequence
  SARM1 targeting guide sequence portion
gcgcgcugccggagcugcag

SEQ ID NO: 1592 - RNA, 20 nt, Artificial Sequence
  SARM1 targeting guide sequence portion
gcgcggacaaggccugcugc

SEQ ID NO: 1593 - RNA, 20 nt, Artificial Sequence
  SARM1 targeting guide sequence portion
gcgcggccugcacacgcguc

SEQ ID NO: 1594 - RNA, 20 nt, Artificial Sequence
  SARM1 targeting guide sequence portion
gcgcuccagggcguccugca

SEQ ID NO: 1595 - RNA, 20 nt, Artificial Sequence
  SARM1 targeting guide sequence portion
gcgcugaagcaggcgggcgg

SEQ ID NO: 1596 - RNA, 20 nt, Artificial Sequence
  SARM1 targeting guide sequence portion
gcgcugccggagcugcagca

SEQ ID NO: 1597 - RNA, 20 nt, Artificial Sequence
  SARM1 targeting guide sequence portion
gcggacaaggccugcugcag

SEQ ID NO: 1598 - RNA, 20 nt, Artificial Sequence
  SARM1 targeting guide sequence portion
gcggagagaagcagcgucag

SEQ ID NO: 1599 - RNA, 20 nt, Artificial Sequence
  SARM1 targeting guide sequence portion
gcggauggcgucgcacagac

SEQ ID NO: 1600 - RNA, 20 nt, Artificial Sequence
  SARM1 targeting guide sequence portion
gcggccucgaccugcuguug

SEQ ID NO: 1601 - RNA, 20 nt, Artificial Sequence
  SARM1 targeting guide sequence portion
gcggccugcacacgcgucuc

SEQ ID NO: 1602 - RNA, 20 nt, Artificial Sequence
  SARM1 targeting guide sequence portion
gcggcugcugcaggcgccgg

SEQ ID NO: 1603 - RNA, 20 nt, Artificial Sequence
  SARM1 targeting guide sequence portion
gcggcuggcggugccugggc

SEQ ID NO: 1604 - RNA, 20 nt, Artificial Sequence
  SARM1 targeting guide sequence portion
gcgggccccgcgaagugucg

SEQ ID NO: 1605 - RNA, 20 nt, Artificial Sequence
  SARM1 targeting guide sequence portion
gcggguggccgcgggccccg

SEQ ID NO: 1606 - RNA, 20 nt, Artificial Sequence
  SARM1 targeting guide sequence portion
gcggugccugggccagaugg

SEQ ID NO: 1607 - RNA, 20 nt, Artificial Sequence
  SARM1 targeting guide sequence portion
gcgguggcacgggcccaugg

SEQ ID NO: 1608 - RNA, 20 nt, Artificial Sequence
  SARM1 targeting guide sequence portion
gcguccugcaccucggugcc

SEQ ID NO: 1609 - RNA, 20 nt, Artificial Sequence
  SARM1 targeting guide sequence portion
gcgucgcacagacccugggc

SEQ ID NO: 1610 - RNA, 20 nt, Artificial Sequence
  SARM1 targeting guide sequence portion
gcgucuccaacuccggcgcc

SEQ ID NO: 1611 - RNA, 20 nt, Artificial Sequence
  SARM1 targeting guide sequence portion
gcgugugcaggccgcgcgcc

SEQ ID NO: 1612 - RNA, 20 nt, Artificial Sequence
  SARM1 targeting guide sequence portion
gcucaccgguucucagccac

SEQ ID NO: 1613 - RNA, 20 nt, Artificial Sequence
  SARM1 targeting guide sequence portion
gcuccagcaggcgcgcggcc

SEQ ID NO: 1614 - RNA, 20 nt, Artificial Sequence
  SARM1 targeting guide sequence portion
gcuccagggcguccugcacc

SEQ ID NO: 1615 - RNA, 20 nt, Artificial Sequence
  SARM1 targeting guide sequence portion
gcuccggcagcgcgcgcucc

SEQ ID NO: 1616 - RNA, 20 nt, Artificial Sequence
  SARM1 targeting guide sequence portion
gcugaagcaggcgggcggcg

SEQ ID NO: 1617 - RNA, 20 nt, Artificial Sequence
  SARM1 targeting guide sequence portion
gcugcagcaggccuuguccg

SEQ ID NO: 1618 - RNA, 20 nt, Artificial Sequence
  SARM1 targeting guide sequence portion
gcugcagcuccggcagcgcg

SEQ ID NO: 1619 - RNA, 20 nt, Artificial Sequence
  SARM1 targeting guide sequence portion
gcugcaggcgccggaguugg

SEQ ID NO: 1620 - RNA, 20 nt, Artificial Sequence
  SARM1 targeting guide sequence portion
gcugccggagcugcagcagg

SEQ ID NO: 1621 - RNA, 20 nt, Artificial Sequence
  SARM1 targeting guide sequence portion
gcugccggccgugggccgcg

SEQ ID NO: 1622 - RNA, 20 nt, Artificial Sequence
  SARM1 targeting guide sequence portion
gcugcugcaggcgccggagu

SEQ ID NO: 1623 - RNA, 20 nt, Artificial Sequence
  SARM1 targeting guide sequence portion
gcugcuucucuccgccuaca

SEQ ID NO: 1624 - RNA, 20 nt, Artificial Sequence
  SARM1 targeting guide sequence portion
gcuggagcagauccuggugg

SEQ ID NO: 1625 - RNA, 20 nt, Artificial Sequence
  SARM1 targeting guide sequence portion
gcuggcggugccugggccag

SEQ ID NO: 1626 - RNA, 20 nt, Artificial Sequence
  SARM1 targeting guide sequence portion
gcugugucgcuucuucgcca

SEQ ID NO: 1627 - RNA, 20 nt, Artificial Sequence
  SARM1 targeting guide sequence portion
gcuguugcggcugcugcagg

SEQ ID NO: 1628 - RNA, 20 nt, Artificial Sequence
  SARM1 targeting guide sequence portion
gcuucagcgcggacaaggcc

SEQ ID NO: 1629 - RNA, 20 nt, Artificial Sequence
  SARM1 targeting guide sequence portion
gcuucucuccgccuacaagc

SEQ ID NO: 1630 - RNA, 20 nt, Artificial Sequence
  SARM1 targeting guide sequence portion
gcuucuucgccaugucgggc

SEQ ID NO: 1631 - RNA, 20 nt, Artificial Sequence
  SARM1 targeting guide sequence portion
gcuuguaggcggagagaagc

SEQ ID NO: 1632 - RNA, 20 nt, Artificial Sequence
  SARM1 targeting guide sequence portion
ggaagaccucggccaggccg

SEQ ID NO: 1633 - RNA, 20 nt, Artificial Sequence
  SARM1 targeting guide sequence portion
ggacaaggccugcugcagcu

SEQ ID NO: 1634 - RNA, 20 nt, Artificial Sequence
  SARM1 targeting guide sequence portion
ggacgcccuggagcgcgcgc

SEQ ID NO: 1635 - RNA, 20 nt, Artificial Sequence
  SARM1 targeting guide sequence portion
ggagacgcgugugcaggccg

SEQ ID NO: 1636 - RNA, 20 nt, Artificial Sequence
  SARM1 targeting guide sequence portion
ggagcagauccugguggcug

SEQ ID NO: 1637 - RNA, 20 nt, Artificial Sequence
  SARM1 targeting guide sequence portion
ggagcgcgcgcugccggagc

SEQ ID NO: 1638 - RNA, 20 nt, Artificial Sequence
  SARM1 targeting guide sequence portion
ggagcugcagcaggccuugu

SEQ ID NO: 1639 - RNA, 20 nt, Artificial Sequence
  SARM1 targeting guide sequence portion
ggaguuggagacgcgugugc

SEQ ID NO: 1640 - RNA, 20 nt, Artificial Sequence
  SARM1 targeting guide sequence portion
ggaucugcuccagcaggcgc

SEQ ID NO: 1641 - RNA, 20 nt, Artificial Sequence
  SARM1 targeting guide sequence portion
ggauggcgucgcacagaccc

SEQ ID NO: 1642 - RNA, 20 nt, Artificial Sequence
  SARM1 targeting guide sequence portion
ggcaccgaggugcaggacgc

SEQ ID NO: 1643 - RNA, 20 nt, Artificial Sequence
  SARM1 targeting guide sequence portion
ggcagcgcgcgcuccagggc

SEQ ID NO: 1644 - RNA, 20 nt, Artificial Sequence
  SARM1 targeting guide sequence portion
ggcaggcaccgaggugcagg

SEQ ID NO: 1645 - RNA, 20 nt, Artificial Sequence
  SARM1 targeting guide sequence portion
ggccagaugggggcgguggc

SEQ ID NO: 1646 - RNA, 20 nt, Artificial Sequence
  SARM1 targeting guide sequence portion
ggcccaggcaccgccagccg

SEQ ID NO: 1647 - RNA, 20 nt, Artificial Sequence
  SARM1 targeting guide sequence portion
ggccccgcgaagugucgccg

SEQ ID NO: 1648 - RNA, 20 nt, Artificial Sequence
  SARM1 targeting guide sequence portion
ggcccgacauggcgaagaag

SEQ ID NO: 1649 - RNA, 20 nt, Artificial Sequence
  SARM1 targeting guide sequence portion
ggcccgcgcgccgcccgccu

SEQ ID NO: 1650 - RNA, 20 nt, Artificial Sequence
  SARM1 targeting guide sequence portion
ggcccgcggccacccgcagc

SEQ ID NO: 1651 - RNA, 20 nt, Artificial Sequence
  SARM1 targeting guide sequence portion
ggcccgugccaccgccccca

SEQ ID NO: 1652 - RNA, 20 nt, Artificial Sequence
  SARM1 targeting guide sequence portion
ggccgaggucuuccaacugg

SEQ ID NO: 1653 - RNA, 20 nt, Artificial Sequence
  SARM1 targeting guide sequence portion
ggccgccaucgaggcggaug

SEQ ID NO: 1654 - RNA, 20 nt, Artificial Sequence
  SARM1 targeting guide sequence portion
ggccgcgagguagcccaggg

SEQ ID NO: 1655 - RNA, 20 nt, Artificial Sequence
  SARM1 targeting guide sequence portion
ggccgcgcgccugcuggagc

SEQ ID NO: 1656 - RNA, 20 nt, Artificial Sequence
  SARM1 targeting guide sequence portion
ggccgcgggccccgcgaagu

SEQ ID NO: 1657 - RNA, 20 nt, Artificial Sequence
  SARM1 targeting guide sequence portion
ggccgugggcccgacauggc

SEQ ID NO: 1658 - RNA, 20 nt, Artificial Sequence
  SARM1 targeting guide sequence portion
ggccgugggccgcgagguag

SEQ ID NO: 1659 - RNA, 20 nt, Artificial Sequence
  SARM1 targeting guide sequence portion
ggccuccuccaccaguugga

SEQ ID NO: 1660 - RNA, 20 nt, Artificial Sequence
  SARM1 targeting guide sequence portion
ggccucgaccugcuguugcg

SEQ ID NO: 1661 - RNA, 20 nt, Artificial Sequence
  SARM1 targeting guide sequence portion
ggccugcacacgcgucucca

SEQ ID NO: 1662 - RNA, 20 nt, Artificial Sequence
  SARM1 targeting guide sequence portion
ggccugcugcagcuccggca

SEQ ID NO: 1663 - RNA, 20 nt, Artificial Sequence
  SARM1 targeting guide sequence portion
ggccuggccgaggucuucca

SEQ ID NO: 1664 - RNA, 20 nt, Artificial Sequence
  SARM1 targeting guide sequence portion
ggccuuguccgcgcugaagc

SEQ ID NO: 1665 - RNA, 20 nt, Artificial Sequence
  SARM1 targeting guide sequence portion
ggcgaagaagcgacacagcu

SEQ ID NO: 1666 - RNA, 20 nt, Artificial Sequence
  SARM1 targeting guide sequence portion
ggcgacacuucgcggggccc

SEQ ID NO: 1667 - RNA, 20 nt, Artificial Sequence
  SARM1 targeting guide sequence portion
ggcgcccggccgugggcccg

SEQ ID NO: 1668 - RNA, 20 nt, Artificial Sequence
  SARM1 targeting guide sequence portion
ggcgccgagcggcuggcggu

SEQ ID NO: 1669 - RNA, 20 nt, Artificial Sequence
  SARM1 targeting guide sequence portion
ggcgccggaguuggagacgc

SEQ ID NO: 1670 - RNA, 20 nt, Artificial Sequence
  SARM1 targeting guide sequence portion
ggcgccggccuggccgaggu

SEQ ID NO: 1671 - RNA, 20 nt, Artificial Sequence
  SARM1 targeting guide sequence portion
ggcgccugcagcagccgcaa

SEQ ID NO: 1672 - RNA, 20 nt, Artificial Sequence
  SARM1 targeting guide sequence portion
ggcgcgcggccugcacacgc

SEQ ID NO: 1673 - RNA, 20 nt, Artificial Sequence
  SARM1 targeting guide sequence portion
ggcggagagaagcagcguca

SEQ ID NO: 1674 - RNA, 20 nt, Artificial Sequence
  SARM1 targeting guide sequence portion
ggcggauggcgucgcacaga

SEQ ID NO: 1675 - RNA, 20 nt, Artificial Sequence
  SARM1 targeting guide sequence portion
ggcggccucgaccugcuguu

SEQ ID NO: 1676 - RNA, 20 nt, Artificial Sequence
  SARM1 targeting guide sequence portion
ggcggugccugggccagaug

SEQ ID NO: 1677 - RNA, 20 nt, Artificial Sequence
  SARM1 targeting guide sequence portion
ggcgguggcacgggcccaug

SEQ ID NO: 1678 - RNA, 20 nt, Artificial Sequence
  SARM1 targeting guide sequence portion
ggcguccugcaccucggugc

SEQ ID NO: 1679 - RNA, 20 nt, Artificial Sequence
  SARM1 targeting guide sequence portion
ggcgucgcacagacccuggg

SEQ ID NO: 1680 - RNA, 20 nt, Artificial Sequence
  SARM1 targeting guide sequence portion
ggcugcugcaggcgccggag

SEQ ID NO: 1681 - RNA, 20 nt, Artificial Sequence
  SARM1 targeting guide sequence portion
ggcuggcggugccugggcca

SEQ ID NO: 1682 - RNA, 20 nt, Artificial Sequence
  SARM1 targeting guide sequence portion
gggcaggcaccgaggugcag

SEQ ID NO: 1683 - RNA, 20 nt, Artificial Sequence
  SARM1 targeting guide sequence portion
gggccagaugggggcggugg

SEQ ID NO: 1684 - RNA, 20 nt, Artificial Sequence
  SARM1 targeting guide sequence portion
gggccccgcgaagugucgcc

SEQ ID NO: 1685 - RNA, 20 nt, Artificial Sequence
  SARM1 targeting guide sequence portion
gggcccgacauggcgaagaa

SEQ ID NO: 1686 - RNA, 20 nt, Artificial Sequence
  SARM1 targeting guide sequence portion
gggcccgugccaccgccccc

SEQ ID NO: 1687 - RNA, 20 nt, Artificial Sequence
  SARM1 targeting guide sequence portion
gggccgcgagguagcccagg

SEQ ID NO: 1688 - RNA, 20 nt, Artificial Sequence
  SARM1 targeting guide sequence portion
gggcgccgagcggcuggcgg

SEQ ID NO: 1689 - RNA, 20 nt, Artificial Sequence
  SARM1 targeting guide sequence portion
gggcgccggccuggccgagg

SEQ ID NO: 1690 - RNA, 20 nt, Artificial Sequence
  SARM1 targeting guide sequence portion
gggcgguggcacgggcccau

SEQ ID NO: 1691 - RNA, 20 nt, Artificial Sequence
  SARM1 targeting guide sequence portion
gggcguccugcaccucggug

SEQ ID NO: 1692 - RNA, 20 nt, Artificial Sequence
  SARM1 targeting guide sequence portion
ggggcaggcaccgaggugca

SEQ ID NO: 1693 - RNA, 20 nt, Artificial Sequence
  SARM1 targeting guide sequence portion
ggggcgguggcacgggccca

SEQ ID NO: 1694 - RNA, 20 nt, Artificial Sequence
  SARM1 targeting guide sequence portion
gggggcaggcaccgaggugc

SEQ ID NO: 1695 - RNA, 20 nt, Artificial Sequence
  SARM1 targeting guide sequence portion
gggggcgguggcacgggccc

SEQ ID NO: 1696 - RNA, 20 nt, Artificial Sequence
  SARM1 targeting guide sequence portion
gggucugugcgacgccaucc

SEQ ID NO: 1697 - RNA, 20 nt, Artificial Sequence
  SARM1 targeting guide sequence portion
ggguggccgcgggccccgcg

SEQ ID NO: 1698 - RNA, 20 nt, Artificial Sequence
  SARM1 targeting guide sequence portion
gguagcccagggucugugcg

SEQ ID NO: 1699 - RNA, 20 nt, Artificial Sequence
  SARM1 targeting guide sequence portion
gguccugacgcugcuucucu

SEQ ID NO: 1700 - RNA, 20 nt, Artificial Sequence
  SARM1 targeting guide sequence portion
ggucgaggccgccaucgagg

SEQ ID NO: 1701 - RNA, 20 nt, Artificial Sequence
  SARM1 targeting guide sequence portion
ggucugugcgacgccauccg

SEQ ID NO: 1702 - RNA, 20 nt, Artificial Sequence
  SARM1 targeting guide sequence portion
ggucuuccaacugguggagg

SEQ ID NO: 1703 - RNA, 20 nt, Artificial Sequence
  SARM1 targeting guide sequence portion
ggugcaggacgcccuggagc

SEQ ID NO: 1704 - RNA, 20 nt, Artificial Sequence
  SARM1 targeting guide sequence portion
ggugccugcccccggcgaca

SEQ ID NO: 1705 - RNA, 20 nt, Artificial Sequence
  SARM1 targeting guide sequence portion
ggugccugggccagaugggg

SEQ ID NO: 1706 - RNA, 20 nt, Artificial Sequence
  SARM1 targeting guide sequence portion
gguggccgcgggccccgcga

SEQ ID NO: 1707 - RNA, 20 nt, Artificial Sequence
  SARM1 targeting guide sequence portion
gguucucagccaccaggauc

SEQ ID NO: 1708 - RNA, 20 nt, Artificial Sequence
  SARM1 targeting guide sequence portion
guagcccagggucugugcga

SEQ ID NO: 1709 - RNA, 20 nt, Artificial Sequence
  SARM1 targeting guide sequence portion
guaggcggagagaagcagcg

SEQ ID NO: 1710 - RNA, 20 nt, Artificial Sequence
  SARM1 targeting guide sequence portion
guccgcgcugaagcaggcgg

SEQ ID NO: 1711 - RNA, 20 nt, Artificial Sequence
  SARM1 targeting guide sequence portion
guccugacgcugcuucucuc

SEQ ID NO: 1712 - RNA, 20 nt, Artificial Sequence
  SARM1 targeting guide sequence portion
guccugcaccucggugccug

SEQ ID NO: 1713 - RNA, 20 nt, Artificial Sequence
  SARM1 targeting guide sequence portion
gucgaggccgccaucgaggc

SEQ ID NO: 1714 - RNA, 20 nt, Artificial Sequence
  SARM1 targeting guide sequence portion
gucgcacagacccugggcua

SEQ ID NO: 1715 - RNA, 20 nt, Artificial Sequence
  SARM1 targeting guide sequence portion
gucgccgggggcaggcaccg

SEQ ID NO: 1716 - RNA, 20 nt, Artificial Sequence
  SARM1 targeting guide sequence portion
gucgcuucuucgccaugucg

SEQ ID NO: 1717 - RNA, 20 nt, Artificial Sequence
  SARM1 targeting guide sequence portion
gucuccaacuccggcgccug

SEQ ID NO: 1718 - RNA, 20 nt, Artificial Sequence
  SARM1 targeting guide sequence portion
gucugugcgacgccauccgc

SEQ ID NO: 1719 - RNA, 20 nt, Artificial Sequence
  SARM1 targeting guide sequence portion
gucuuccaacugguggagga

SEQ ID NO: 1720 - RNA, 20 nt, Artificial Sequence
  SARM1 targeting guide sequence portion
gugcaggacgcccuggagcg

SEQ ID NO: 1721 - RNA, 20 nt, Artificial Sequence
  SARM1 targeting guide sequence portion
gugcaggccgcgcgccugcu

SEQ ID NO: 1722 - RNA, 20 nt, Artificial Sequence
  SARM1 targeting guide sequence portion
gugccaccgcccccaucugg

SEQ ID NO: 1723 - RNA, 20 nt, Artificial Sequence
  SARM1 targeting guide sequence portion
gugccugcccccggcgacac

SEQ ID NO: 1724 - RNA, 20 nt, Artificial Sequence
  SARM1 targeting guide sequence portion
gugccugggccagauggggg

SEQ ID NO: 1725 - RNA, 20 nt, Artificial Sequence
  SARM1 targeting guide sequence portion
gugcgacgccauccgccucg

SEQ ID NO: 1726 - RNA, 20 nt, Artificial Sequence
  SARM1 targeting guide sequence portion
guggccgcgggccccgcgaa

SEQ ID NO: 1727 - RNA, 20 nt, Artificial Sequence
  SARM1 targeting guide sequence portion
gugggcccgacauggcgaag

SEQ ID NO: 1728 - RNA, 20 nt, Artificial Sequence
  SARM1 targeting guide sequence portion
gugggccgcgagguagccca

SEQ ID NO: 1729 - RNA, 20 nt, Artificial Sequence
  SARM1 targeting guide sequence portion
gugggcgccggccuggccga

SEQ ID NO: 1730 - RNA, 20 nt, Artificial Sequence
  SARM1 targeting guide sequence portion
gugucgccgggggcaggcac

SEQ ID NO: 1731 - RNA, 20 nt, Artificial Sequence
  SARM1 targeting guide sequence portion
gugucgcuucuucgccaugu

SEQ ID NO: 1732 - RNA, 20 nt, Artificial Sequence
  SARM1 targeting guide sequence portion
gugugcaggccgcgcgccug

SEQ ID NO: 1733 - RNA, 20 nt, Artificial Sequence
  SARM1 targeting guide sequence portion
guucucagccaccaggaucu

SEQ ID NO: 1734 - RNA, 20 nt, Artificial Sequence
  SARM1 targeting guide sequence portion
guugcggcugcugcaggcgc

SEQ ID NO: 1735 - RNA, 20 nt, Artificial Sequence
  SARM1 targeting guide sequence portion
guuggaagaccucggccagg

SEQ ID NO: 1736 - RNA, 20 nt, Artificial Sequence
  SARM1 targeting guide sequence portion
guuggagacgcgugugcagg

SEQ ID NO: 1737 - RNA, 20 nt, Artificial Sequence
  SARM1 targeting guide sequence portion
uacaagcugugucgcuucuu

SEQ ID NO: 1738 - RNA, 20 nt, Artificial Sequence
  SARM1 targeting guide sequence portion
uagcccagggucugugcgac

SEQ ID NO: 1739 - RNA, 20 nt, Artificial Sequence
  SARM1 targeting guide sequence portion
uaggcggagagaagcagcgu

SEQ ID NO: 1740 - RNA, 20 nt, Artificial Sequence
  SARM1 targeting guide sequence portion
ucaccgguucucagccacca

SEQ ID NO: 1741 - RNA, 20 nt, Artificial Sequence
  SARM1 targeting guide sequence portion
ucagccaccaggaucugcuc

SEQ ID NO: 1742 - RNA, 20 nt, Artificial Sequence
  SARM1 targeting guide sequence portion
ucagcgcggacaaggccugc

SEQ ID NO: 1743 - RNA, 20 nt, Artificial Sequence
  SARM1 targeting guide sequence portion
uccaacuccggcgccugcag

SEQ ID NO: 1744 - RNA, 20 nt, Artificial Sequence
  SARM1 targeting guide sequence portion
uccaacugguggaggaggcc

SEQ ID NO: 1745 - RNA, 20 nt, Artificial Sequence
  SARM1 targeting guide sequence portion
uccaccaguuggaagaccuc

SEQ ID NO: 1746 - RNA, 20 nt, Artificial Sequence
  SARM1 targeting guide sequence portion
uccagcaggcgcgcggccug

SEQ ID NO: 1747 - RNA, 20 nt, Artificial Sequence
  SARM1 targeting guide sequence portion
uccagggcguccugcaccuc

SEQ ID NO: 1748 - RNA, 20 nt, Artificial Sequence
  SARM1 targeting guide sequence portion
uccgccuacaagcugugucg

SEQ ID NO: 1749 - RNA, 20 nt, Artificial Sequence
  SARM1 targeting guide sequence portion
uccgccucgauggcggccuc

SEQ ID NO: 1750 - RNA, 20 nt, Artificial Sequence
  SARM1 targeting guide sequence portion
uccgcgcugaagcaggcggg

SEQ ID NO: 1751 - RNA, 20 nt, Artificial Sequence
  SARM1 targeting guide sequence portion
uccggcagcgcgcgcuccag

SEQ ID NO: 1752 - RNA, 20 nt, Artificial Sequence
  SARM1 targeting guide sequence portion
uccggcgccugcagcagccg

SEQ ID NO: 1753 - RNA, 20 nt, Artificial Sequence
  SARM1 targeting guide sequence portion
uccuccaccaguuggaagac

SEQ ID NO: 1754 - RNA, 20 nt, Artificial Sequence
  SARM1 targeting guide sequence portion
uccugacgcugcuucucucc

SEQ ID NO: 1755 - RNA, 20 nt, Artificial Sequence
  SARM1 targeting guide sequence portion
uccugcaccucggugccugc

SEQ ID NO: 1756 - RNA, 20 nt, Artificial Sequence
  SARM1 targeting guide sequence portion
uccugguggcugagaaccgg

SEQ ID NO: 1757 - RNA, 20 nt, Artificial Sequence
  SARM1 targeting guide sequence portion
ucgaccugcuguugcggcug

SEQ ID NO: 1758 - RNA, 20 nt, Artificial Sequence
  SARM1 targeting guide sequence portion
ucgaggccgccaucgaggcg

SEQ ID NO: 1759 - RNA, 20 nt, Artificial Sequence
  SARM1 targeting guide sequence portion
ucgaggcggauggcgucgca

SEQ ID NO: 1760 - RNA, 20 nt, Artificial Sequence
  SARM1 targeting guide sequence portion
ucgauggcggccucgaccug

SEQ ID NO: 1761 - RNA, 20 nt, Artificial Sequence
  SARM1 targeting guide sequence portion
ucgcacagacccugggcuac

SEQ ID NO: 1762 - RNA, 20 nt, Artificial Sequence
  SARM1 targeting guide sequence portion
ucgccaugucgggcccacgg

SEQ ID NO: 1763 - RNA, 20 nt, Artificial Sequence
  SARM1 targeting guide sequence portion
ucgccgggggcaggcaccga

SEQ ID NO: 1764 - RNA, 20 nt, Artificial Sequence
  SARM1 targeting guide sequence portion
ucgcuucuucgccaugucgg

SEQ ID NO: 1765 - RNA, 20 nt, Artificial Sequence
  SARM1 targeting guide sequence portion
ucggcgcccggccgugggcc

SEQ ID NO: 1766 - RNA, 20 nt, Artificial Sequence
  SARM1 targeting guide sequence portion
ucggugccugcccccggcga

SEQ ID NO: 1767 - RNA, 20 nt, Artificial Sequence
  SARM1 targeting guide sequence portion
ucucagccaccaggaucugc

SEQ ID NO: 1768 - RNA, 20 nt, Artificial Sequence
  SARM1 targeting guide sequence portion
ucuccaacuccggcgccugc

SEQ ID NO: 1769 - RNA, 20 nt, Artificial Sequence
  SARM1 targeting guide sequence portion
ucuccgccuacaagcugugu

SEQ ID NO: 1770 - RNA, 20 nt, Artificial Sequence
  SARM1 targeting guide sequence portion
ucucuccgccuacaagcugu

SEQ ID NO: 1771 - RNA, 20 nt, Artificial Sequence
  SARM1 targeting guide sequence portion
ucugcuccagcaggcgcgcg

SEQ ID NO: 1772 - RNA, 20 nt, Artificial Sequence
  SARM1 targeting guide sequence portion
ucuggcccaggcaccgccag

SEQ ID NO: 1773 - RNA, 20 nt, Artificial Sequence
  SARM1 targeting guide sequence portion
ucugugcgacgccauccgcc

SEQ ID NO: 1774 - RNA, 20 nt, Artificial Sequence
  SARM1 targeting guide sequence portion
ucuuccaacugguggaggag

SEQ ID NO: 1775 - RNA, 20 nt, Artificial Sequence
  SARM1 targeting guide sequence portion
ucuucgccaugucgggccca

SEQ ID NO: 1776 - RNA, 20 nt, Artificial Sequence
  SARM1 targeting guide sequence portion
ugaagcaggcgggcggcgcg

SEQ ID NO: 1777 - RNA, 20 nt, Artificial Sequence
  SARM1 targeting guide sequence portion
ugacgcugcuucucuccgcc

SEQ ID NO: 1778 - RNA, 20 nt, Artificial Sequence
  SARM1 targeting guide sequence portion
ugcacacgcgucuccaacuc

SEQ ID NO: 1779 - RNA, 20 nt, Artificial Sequence
  SARM1 targeting guide sequence portion
ugcaccucggugccugcccc

SEQ ID NO: 1780 - RNA, 20 nt, Artificial Sequence
  SARM1 targeting guide sequence portion
ugcagcagccgcaacagcag

SEQ ID NO: 1781 - RNA, 20 nt, Artificial Sequence
  SARM1 targeting guide sequence portion
ugcagcaggccuuguccgcg

SEQ ID NO: 1782 - RNA, 20 nt, Artificial Sequence
  SARM1 targeting guide sequence portion
ugcagcuccggcagcgcgcg

SEQ ID NO: 1783 - RNA, 20 nt, Artificial Sequence
  SARM1 targeting guide sequence portion
ugcaggacgcccuggagcgc

SEQ ID NO: 1784 - RNA, 20 nt, Artificial Sequence
  SARM1 targeting guide sequence portion
ugcaggccgcgcgccugcug

SEQ ID NO: 1785 - RNA, 20 nt, Artificial Sequence
  SARM1 targeting guide sequence portion
ugcaggcgccggaguuggag

SEQ ID NO: 1786 - RNA, 20 nt, Artificial Sequence
  SARM1 targeting guide sequence portion
ugccaccgcccccaucuggc

SEQ ID NO: 1787 - RNA, 20 nt, Artificial Sequence
  SARM1 targeting guide sequence portion
ugcccccggcgacacuucgc

SEQ ID NO: 1788 - RNA, 20 nt, Artificial Sequence
  SARM1 targeting guide sequence portion
ugccggagcugcagcaggcc

SEQ ID NO: 1789 - RNA, 20 nt, Artificial Sequence
  SARM1 targeting guide sequence portion
ugccugcccccggcgacacu

SEQ ID NO: 1790 - RNA, 20 nt, Artificial Sequence
  SARM1 targeting guide sequence portion
ugccugggccagaugggggc

SEQ ID NO: 1791 - RNA, 20 nt, Artificial Sequence
  SARM1 targeting guide sequence portion
ugcgacgccauccgccucga

SEQ ID NO: 1792 - RNA, 20 nt, Artificial Sequence
  SARM1 targeting guide sequence portion
ugcggcugcugcaggcgccg

SEQ ID NO: 1793 - RNA, 20 nt, Artificial Sequence
  SARM1 targeting guide sequence portion
ugcggguggccgcgggcccc

SEQ ID NO: 1794 - RNA, 20 nt, Artificial Sequence
  SARM1 targeting guide sequence portion
ugcuccagcaggcgcgcggc

SEQ ID NO: 1795 - RNA, 20 nt, Artificial Sequence
  SARM1 targeting guide sequence portion
ugcugcagcuccggcagcgc

SEQ ID NO: 1796 - RNA, 20 nt, Artificial Sequence
  SARM1 targeting guide sequence portion
ugcugcaggcgccggaguug

SEQ ID NO: 1797 - RNA, 20 nt, Artificial Sequence
  SARM1 targeting guide sequence portion
ugcuggagcagauccuggug

SEQ ID NO: 1798 - RNA, 20 nt, Artificial Sequence
  SARM1 targeting guide sequence portion
ugcuguugcggcugcugcag

SEQ ID NO: 1799 - RNA, 20 nt, Artificial Sequence
  SARM1 targeting guide sequence portion
ugcuucagcgcggacaaggc

SEQ ID NO: 1800 - RNA, 20 nt, Artificial Sequence
  SARM1 targeting guide sequence portion
ugcuucucuccgccuacaag

SEQ ID NO: 1801 - RNA, 20 nt, Artificial Sequence
  SARM1 targeting guide sequence portion
uggaagaccucggccaggcc

SEQ ID NO: 1802 - RNA, 20 nt, Artificial Sequence
  SARM1 targeting guide sequence portion
uggagacgcgugugcaggcc

SEQ ID NO: 1803 - RNA, 20 nt, Artificial Sequence
  SARM1 targeting guide sequence portion
uggagcagauccugguggcu

SEQ ID NO: 1804 - RNA, 20 nt, Artificial Sequence
  SARM1 targeting guide sequence portion
uggagcgcgcgcugccggag

SEQ ID NO: 1805 - RNA, 20 nt, Artificial Sequence
  SARM1 targeting guide sequence portion
uggcccaggcaccgccagcc

SEQ ID NO: 1806 - RNA, 20 nt, Artificial Sequence
  SARM1 targeting guide sequence portion
uggccgaggucuuccaacug

SEQ ID NO: 1807 - RNA, 20 nt, Artificial Sequence
  SARM1 targeting guide sequence portion
uggccgcgggccccgcgaag

SEQ ID NO: 1808 - RNA, 20 nt, Artificial Sequence
  SARM1 targeting guide sequence portion
uggcgaagaagcgacacagc

SEQ ID NO: 1809 - RNA, 20 nt, Artificial Sequence
  SARM1 targeting guide sequence portion
uggcggccucgaccugcugu

SEQ ID NO: 1810 - RNA, 20 nt, Artificial Sequence
  SARM1 targeting guide sequence portion
uggcggugccugggccagau

SEQ ID NO: 1811 - RNA, 20 nt, Artificial Sequence
  SARM1 targeting guide sequence portion
uggcgucgcacagacccugg

SEQ ID NO: 1812 - RNA, 20 nt, Artificial Sequence
  SARM1 targeting guide sequence portion
ugggccagaugggggcggug

SEQ ID NO: 1813 - RNA, 20 nt, Artificial Sequence
  SARM1 targeting guide sequence portion
ugggcccgacauggcgaaga

SEQ ID NO: 1814 - RNA, 20 nt, Artificial Sequence
  SARM1 targeting guide sequence portion
ugggcccgugccaccgcccc

SEQ ID NO: 1815 - RNA, 20 nt, Artificial Sequence
  SARM1 targeting guide sequence portion
ugggccgcgagguagcccag

SEQ ID NO: 1816 - RNA, 20 nt, Artificial Sequence
  SARM1 targeting guide sequence portion
ugggcgccggccuggccgag

SEQ ID NO: 1817 - RNA, 20 nt, Artificial Sequence
  SARM1 targeting guide sequence portion
ugggggcgguggcacgggcc

SEQ ID NO: 1818 - RNA, 20 nt, Artificial Sequence
  SARM1 targeting guide sequence portion
ugguccugacgcugcuucuc

SEQ ID NO: 1819 - RNA, 20 nt, Artificial Sequence
  SARM1 targeting guide sequence portion
uguaggcggagagaagcagc

SEQ ID NO: 1820 - RNA, 20 nt, Artificial Sequence
  SARM1 targeting guide sequence portion
uguccgcgcugaagcaggcg

SEQ ID NO: 1821 - RNA, 20 nt, Artificial Sequence
  SARM1 targeting guide sequence portion
ugucgccgggggcaggcacc

SEQ ID NO: 1822 - RNA, 20 nt, Artificial Sequence
  SARM1 targeting guide sequence portion
ugucgcuucuucgccauguc

SEQ ID NO: 1823 - RNA, 20 nt, Artificial Sequence
  SARM1 targeting guide sequence portion
ugucgggcccacggccgggc

SEQ ID NO: 1824 - RNA, 20 nt, Artificial Sequence
  SARM1 targeting guide sequence portion
ugugcaggccgcgcgccugc

SEQ ID NO: 1825 - RNA, 20 nt, Artificial Sequence
  SARM1 targeting guide sequence portion
ugugcgacgccauccgccuc

SEQ ID NO: 1826 - RNA, 20 nt, Artificial Sequence
  SARM1 targeting guide sequence portion
ugugucgcuucuucgccaug

SEQ ID NO: 1827 - RNA, 20 nt, Artificial Sequence
  SARM1 targeting guide sequence portion
uguugcggcugcugcaggcg

SEQ ID NO: 1828 - RNA, 20 nt, Artificial Sequence
  SARM1 targeting guide sequence portion
uucagcgcggacaaggccug

SEQ ID NO: 1829 - RNA, 20 nt, Artificial Sequence
  SARM1 targeting guide sequence portion
uuccaacugguggaggaggc

SEQ ID NO: 1830 - RNA, 20 nt, Artificial Sequence
  SARM1 targeting guide sequence portion
uucgccaugucgggcccacg

SEQ ID NO: 1831 - RNA, 20 nt, Artificial Sequence
  SARM1 targeting guide sequence portion
uucucagccaccaggaucug

SEQ ID NO: 1832 - RNA, 20 nt, Artificial Sequence
  SARM1 targeting guide sequence portion
uucucuccgccuacaagcug

SEQ ID NO: 1833 - RNA, 20 nt, Artificial Sequence
  SARM1 targeting guide sequence portion
uucuucgccaugucgggccc

SEQ ID NO: 1834 - RNA, 20 nt, Artificial Sequence
  SARM1 targeting guide sequence portion
uugcggcugcugcaggcgcc

SEQ ID NO: 1835 - RNA, 20 nt, Artificial Sequence
  SARM1 targeting guide sequence portion
uuggaagaccucggccaggc

SEQ ID NO: 1836 - RNA, 20 nt, Artificial Sequence
  SARM1 targeting guide sequence portion
uuggagacgcgugugcaggc

SEQ ID NO: 1837 - RNA, 20 nt, Artificial Sequence
  SARM1 targeting guide sequence portion
uuguaggcggagagaagcag

SEQ ID NO: 1838 - RNA, 20 nt, Artificial Sequence
  SARM1 targeting guide sequence portion
uuguccgcgcugaagcaggc

SEQ ID NO: 1839 - RNA, 21 nt, Artificial Sequence
  SARM1 targeting guide sequence portion
aacagcaggucgaggccgcca

SEQ ID NO: 1840 - RNA, 21 nt, Artificial Sequence
  SARM1 targeting guide sequence portion
aacuccggcgccugcagcagc

SEQ ID NO: 1841 - RNA, 21 nt, Artificial Sequence
  SARM1 targeting guide sequence portion
aacugguggaggaggccuggc

SEQ ID NO: 1842 - RNA, 21 nt, Artificial Sequence
  SARM1 targeting guide sequence portion
aagaagcgacacagcuuguag

SEQ ID NO: 1843 - RNA, 21 nt, Artificial Sequence
  SARM1 targeting guide sequence portion
aagaccucggccaggccggcg

SEQ ID NO: 1844 - RNA, 21 nt, Artificial Sequence
  SARM1 targeting guide sequence portion
aagcgacacagcuuguaggcg

SEQ ID NO: 1845 - RNA, 21 nt, Artificial Sequence
  SARM1 targeting guide sequence portion
aagcugugucgcuucuucgcc

SEQ ID NO: 1846 - RNA, 21 nt, Artificial Sequence
  SARM1 targeting guide sequence portion
aaggccugcugcagcuccggc

SEQ ID NO: 1847 - RNA, 21 nt, Artificial Sequence
  SARM1 targeting guide sequence portion
aagugucgccgggggcaggca

SEQ ID NO: 1848 - RNA, 21 nt, Artificial Sequence
  SARM1 targeting guide sequence portion
acaagcugugucgcuucuucg

SEQ ID NO: 1849 - RNA, 21 nt, Artificial Sequence
  SARM1 targeting guide sequence portion
acaaggccugcugcagcuccg

SEQ ID NO: 1850 - RNA, 21 nt, Artificial Sequence
  SARM1 targeting guide sequence portion
acacagcuuguaggcggagag

SEQ ID NO: 1851 - RNA, 21 nt, Artificial Sequence
  SARM1 targeting guide sequence portion
acacgcgucuccaacuccggc

SEQ ID NO: 1852 - RNA, 21 nt, Artificial Sequence
  SARM1 targeting guide sequence portion
acacuucgcggggcccgcggc

SEQ ID NO: 1853 - RNA, 21 nt, Artificial Sequence
  SARM1 targeting guide sequence portion
acagacccugggcuaccucgc

SEQ ID NO: 1854 - RNA, 21 nt, Artificial Sequence
  SARM1 targeting guide sequence portion
acagcaggucgaggccgccau

SEQ ID NO: 1855 - RNA, 21 nt, Artificial Sequence
  SARM1 targeting guide sequence portion
acagcuuguaggcggagagaa

SEQ ID NO: 1856 - RNA, 21 nt, Artificial Sequence
  SARM1 targeting guide sequence portion
acauggcgaagaagcgacaca

SEQ ID NO: 1857 - RNA, 21 nt, Artificial Sequence
  SARM1 targeting guide sequence portion
accaggaucugcuccagcagg

SEQ ID NO: 1858 - RNA, 21 nt, Artificial Sequence
  SARM1 targeting guide sequence portion
accaguuggaagaccucggcc

SEQ ID NO: 1859 - RNA, 21 nt, Artificial Sequence
  SARM1 targeting guide sequence portion
accaugggcccgugccaccgc

SEQ ID NO: 1860 - RNA, 21 nt, Artificial Sequence
  SARM1 targeting guide sequence portion
acccugggcuaccucgcggcc

SEQ ID NO: 1861 - RNA, 21 nt, Artificial Sequence
  SARM1 targeting guide sequence portion
accgaggugcaggacgcccug

SEQ ID NO: 1862 - RNA, 21 nt, Artificial Sequence
  SARM1 targeting guide sequence portion
accgcccccaucuggcccagg

SEQ ID NO: 1863 - RNA, 21 nt, Artificial Sequence
  SARM1 targeting guide sequence portion
accgguucucagccaccagga

SEQ ID NO: 1864 - RNA, 21 nt, Artificial Sequence
  SARM1 targeting guide sequence portion
accucgcggcccacggccggc

SEQ ID NO: 1865 - RNA, 21 nt, Artificial Sequence
  SARM1 targeting guide sequence portion
accucggugccugcccccggc

SEQ ID NO: 1866 - RNA, 21 nt, Artificial Sequence
  SARM1 targeting guide sequence portion
accugcuguugcggcugcugc

SEQ ID NO: 1867 - RNA, 21 nt, Artificial Sequence
  SARM1 targeting guide sequence portion
acgccauccgccucgauggcg

SEQ ID NO: 1868 - RNA, 21 nt, Artificial Sequence
  SARM1 targeting guide sequence portion
acgcccuggagcgcgcgcugc

SEQ ID NO: 1869 - RNA, 21 nt, Artificial Sequence
  SARM1 targeting guide sequence portion
acgcgucuccaacuccggcgc

SEQ ID NO: 1870 - RNA, 21 nt, Artificial Sequence
  SARM1 targeting guide sequence portion
acgcgugugcaggccgcgcgc

SEQ ID NO: 1871 - RNA, 21 nt, Artificial Sequence
  SARM1 targeting guide sequence portion
acgcugcuucucuccgccuac

SEQ ID NO: 1872 - RNA, 21 nt, Artificial Sequence
  SARM1 targeting guide sequence portion
acuccggcgccugcagcagcc

SEQ ID NO: 1873 - RNA, 21 nt, Artificial Sequence
  SARM1 targeting guide sequence portion
agaagcgacacagcuuguagg

SEQ ID NO: 1874 - RNA, 21 nt, Artificial Sequence
  SARM1 targeting guide sequence portion
agacccugggcuaccucgcgg

SEQ ID NO: 1875 - RNA, 21 nt, Artificial Sequence
  SARM1 targeting guide sequence portion
agaccucggccaggccggcgc

SEQ ID NO: 1876 - RNA, 21 nt, Artificial Sequence
  SARM1 targeting guide sequence portion
agacgcgugugcaggccgcgc

SEQ ID NO: 1877 - RNA, 21 nt, Artificial Sequence
  SARM1 targeting guide sequence portion
agauccugguggcugagaacc

SEQ ID NO: 1878 - RNA, 21 nt, Artificial Sequence
  SARM1 targeting guide sequence portion
agaugggggcgguggcacggg

SEQ ID NO: 1879 - RNA, 21 nt, Artificial Sequence
  SARM1 targeting guide sequence portion
agcagauccugguggcugaga

SEQ ID NO: 1880 - RNA, 21 nt, Artificial Sequence
  SARM1 targeting guide sequence portion
agcagccaggccuccuccacc

SEQ ID NO: 1881 - RNA, 21 nt, Artificial Sequence
  SARM1 targeting guide sequence portion
agcagccgcaacagcaggucg

SEQ ID NO: 1882 - RNA, 21 nt, Artificial Sequence
  SARM1 targeting guide sequence portion
agcaggccuuguccgcgcuga

SEQ ID NO: 1883 - RNA, 21 nt, Artificial Sequence
  SARM1 targeting guide sequence portion
agcaggcgcgcggccugcaca

SEQ ID NO: 1884 - RNA, 21 nt, Artificial Sequence
  SARM1 targeting guide sequence portion
agcaggucgaggccgccaucg

SEQ ID NO: 1885 - RNA, 21 nt, Artificial Sequence
  SARM1 targeting guide sequence portion
agccaccaggaucugcuccag

SEQ ID NO: 1886 - RNA, 21 nt, Artificial Sequence
  SARM1 targeting guide sequence portion
agccaggccuccuccaccagu

SEQ ID NO: 1887 - RNA, 21 nt, Artificial Sequence
  SARM1 targeting guide sequence portion
agcccaccaugggcccgugcc

SEQ ID NO: 1888 - RNA, 21 nt, Artificial Sequence
  SARM1 targeting guide sequence portion
agcccagggucugugcgacgc

SEQ ID NO: 1889 - RNA, 21 nt, Artificial Sequence
  SARM1 targeting guide sequence portion
agccgcaacagcaggucgagg

SEQ ID NO: 1890 - RNA, 21 nt, Artificial Sequence
  SARM1 targeting guide sequence portion
agcgacacagcuuguaggcgg

SEQ ID NO: 1891 - RNA, 21 nt, Artificial Sequence
  SARM1 targeting guide sequence portion
agcgcgcgcuccagggcgucc

SEQ ID NO: 1892 - RNA, 21 nt, Artificial Sequence
  SARM1 targeting guide sequence portion
agcgcgcgcugccggagcugc

SEQ ID NO: 1893 - RNA, 21 nt, Artificial Sequence
  SARM1 targeting guide sequence portion
agcgcggacaaggccugcugc

SEQ ID NO: 1894 - RNA, 21 nt, Artificial Sequence
  SARM1 targeting guide sequence portion
agcggcuggcggugccugggc

SEQ ID NO: 1895 - RNA, 21 nt, Artificial Sequence
  SARM1 targeting guide sequence portion
agcuccggcagcgcgcgcucc

SEQ ID NO: 1896 - RNA, 21 nt, Artificial Sequence
  SARM1 targeting guide sequence portion
agcugcagcaggccuuguccg

SEQ ID NO: 1897 - RNA, 21 nt, Artificial Sequence
  SARM1 targeting guide sequence portion
agcugugucgcuucuucgcca

SEQ ID NO: 1898 - RNA, 21 nt, Artificial Sequence
  SARM1 targeting guide sequence portion
agcuuguaggcggagagaagc

SEQ ID NO: 1899 - RNA, 21 nt, Artificial Sequence
  SARM1 targeting guide sequence portion
aggacgcccuggagcgcgcgc

SEQ ID NO: 1900 - RNA, 21 nt, Artificial Sequence
  SARM1 targeting guide sequence portion
aggaucugcuccagcaggcgc

SEQ ID NO: 1901 - RNA, 21 nt, Artificial Sequence
  SARM1 targeting guide sequence portion
aggcaccgaggugcaggacgc

SEQ ID NO: 1902 - RNA, 21 nt, Artificial Sequence
  SARM1 targeting guide sequence portion
aggccgccaucgaggcggaug

SEQ ID NO: 1903 - RNA, 21 nt, Artificial Sequence
  SARM1 targeting guide sequence portion
aggccgcgcgccugcuggagc

SEQ ID NO: 1904 - RNA, 21 nt, Artificial Sequence
  SARM1 targeting guide sequence portion
aggccuccuccaccaguugga

SEQ ID NO: 1905 - RNA, 21 nt, Artificial Sequence
  SARM1 targeting guide sequence portion
aggccugcugcagcuccggca

SEQ ID NO: 1906 - RNA, 21 nt, Artificial Sequence
  SARM1 targeting guide sequence portion
aggccuuguccgcgcugaagc

SEQ ID NO: 1907 - RNA, 21 nt, Artificial Sequence
  SARM1 targeting guide sequence portion
aggcgccggaguuggagacgc

SEQ ID NO: 1908 - RNA, 21 nt, Artificial Sequence
  SARM1 targeting guide sequence portion
aggcgcgcggccugcacacgc

SEQ ID NO: 1909 - RNA, 21 nt, Artificial Sequence
  SARM1 targeting guide sequence portion
aggcggagagaagcagcguca

SEQ ID NO: 1910 - RNA, 21 nt, Artificial Sequence
  SARM1 targeting guide sequence portion
aggcggauggcgucgcacaga

SEQ ID NO: 1911 - RNA, 21 nt, Artificial Sequence
  SARM1 targeting guide sequence portion
agggcguccugcaccucggug

SEQ ID NO: 1912 - RNA, 21 nt, Artificial Sequence
  SARM1 targeting guide sequence portion
agggucugugcgacgccaucc

SEQ ID NO: 1913 - RNA, 21 nt, Artificial Sequence
  SARM1 targeting guide sequence portion
agguagcccagggucugugcg

SEQ ID NO: 1914 - RNA, 21 nt, Artificial Sequence
  SARM1 targeting guide sequence portion
aggucgaggccgccaucgagg

SEQ ID NO: 1915 - RNA, 21 nt, Artificial Sequence
  SARM1 targeting guide sequence portion
aggucuuccaacugguggagg

SEQ ID NO: 1916 - RNA, 21 nt, Artificial Sequence
  SARM1 targeting guide sequence portion
aggugcaggacgcccuggagc

SEQ ID NO: 1917 - RNA, 21 nt, Artificial Sequence
  SARM1 targeting guide sequence portion
agugucgccgggggcaggcac

SEQ ID NO: 1918 - RNA, 21 nt, Artificial Sequence
  SARM1 targeting guide sequence portion
aguuggaagaccucggccagg

SEQ ID NO: 1919 - RNA, 21 nt, Artificial Sequence
  SARM1 targeting guide sequence portion
aguuggagacgcgugugcagg

SEQ ID NO: 1920 - RNA, 21 nt, Artificial Sequence
  SARM1 targeting guide sequence portion
auccgccucgauggcggccuc

SEQ ID NO: 1921 - RNA, 21 nt, Artificial Sequence
  SARM1 targeting guide sequence portion
auccugguggcugagaaccgg

SEQ ID NO: 1922 - RNA, 21 nt, Artificial Sequence
  SARM1 targeting guide sequence portion
aucgaggcggauggcgucgca

SEQ ID NO: 1923 - RNA, 21 nt, Artificial Sequence
  SARM1 targeting guide sequence portion
aucugcuccagcaggcgcgcg

SEQ ID NO: 1924 - RNA, 21 nt, Artificial Sequence
  SARM1 targeting guide sequence portion
aucuggcccaggcaccgccag

SEQ ID NO: 1925 - RNA, 21 nt, Artificial Sequence
  SARM1 targeting guide sequence portion
auggcgaagaagcgacacagc

SEQ ID NO: 1926 - RNA, 21 nt, Artificial Sequence
  SARM1 targeting guide sequence portion
auggcggccucgaccugcugu

SEQ ID NO: 1927 - RNA, 21 nt, Artificial Sequence
  SARM1 targeting guide sequence portion
auggcgucgcacagacccugg

SEQ ID NO: 1928 - RNA, 21 nt, Artificial Sequence
  SARM1 targeting guide sequence portion
augggcccgugccaccgcccc

SEQ ID NO: 1929 - RNA, 21 nt, Artificial Sequence
  SARM1 targeting guide sequence portion
augggggcgguggcacgggcc

SEQ ID NO: 1930 - RNA, 21 nt, Artificial Sequence
  SARM1 targeting guide sequence portion
augguccugacgcugcuucuc

SEQ ID NO: 1931 - RNA, 21 nt, Artificial Sequence
  SARM1 targeting guide sequence portion
augucgggcccacggccgggc

SEQ ID NO: 1932 - RNA, 21 nt, Artificial Sequence
  SARM1 targeting guide sequence portion
caacagcaggucgaggccgcc

SEQ ID NO: 1933 - RNA, 21 nt, Artificial Sequence
  SARM1 targeting guide sequence portion
caacuccggcgccugcagcag

SEQ ID NO: 1934 - RNA, 21 nt, Artificial Sequence
  SARM1 targeting guide sequence portion
caacugguggaggaggccugg

SEQ ID NO: 1935 - RNA, 21 nt, Artificial Sequence
  SARM1 targeting guide sequence portion
caagcugugucgcuucuucgc

SEQ ID NO: 1936 - RNA, 21 nt, Artificial Sequence
  SARM1 targeting guide sequence portion
caaggccugcugcagcuccgg

SEQ ID NO: 1937 - RNA, 21 nt, Artificial Sequence
  SARM1 targeting guide sequence portion
cacacgcgucuccaacuccgg

SEQ ID NO: 1938 - RNA, 21 nt, Artificial Sequence
  SARM1 targeting guide sequence portion
cacagacccugggcuaccucg

SEQ ID NO: 1939 - RNA, 21 nt, Artificial Sequence
  SARM1 targeting guide sequence portion
cacagcuuguaggcggagaga

SEQ ID NO: 1940 - RNA, 21 nt, Artificial Sequence
  SARM1 targeting guide sequence portion
caccaggaucugcuccagcag

SEQ ID NO: 1941 - RNA, 21 nt, Artificial Sequence
  SARM1 targeting guide sequence portion
caccaguuggaagaccucggc

SEQ ID NO: 1942 - RNA, 21 nt, Artificial Sequence
  SARM1 targeting guide sequence portion
caccaugggcccgugccaccg

SEQ ID NO: 1943 - RNA, 21 nt, Artificial Sequence
  SARM1 targeting guide sequence portion
caccgaggugcaggacgcccu

SEQ ID NO: 1944 - RNA, 21 nt, Artificial Sequence
  SARM1 targeting guide sequence portion
caccgcccccaucuggcccag

SEQ ID NO: 1945 - RNA, 21 nt, Artificial Sequence
  SARM1 targeting guide sequence portion
caccgguucucagccaccagg

SEQ ID NO: 1946 - RNA, 21 nt, Artificial Sequence
  SARM1 targeting guide sequence portion
caccucggugccugcccccgg

SEQ ID NO: 1947 - RNA, 21 nt, Artificial Sequence
  SARM1 targeting guide sequence portion
cacgcgucuccaacuccggcg

SEQ ID NO: 1948 - RNA, 21 nt, Artificial Sequence
  SARM1 targeting guide sequence portion
cagacccugggcuaccucgcg

SEQ ID NO: 1949 - RNA, 21 nt, Artificial Sequence
  SARM1 targeting guide sequence portion
cagauccugguggcugagaac

SEQ ID NO: 1950 - RNA, 21 nt, Artificial Sequence
  SARM1 targeting guide sequence portion
cagaugggggcgguggcacgg

SEQ ID NO: 1951 - RNA, 21 nt, Artificial Sequence
  SARM1 targeting guide sequence portion
cagcagccaggccuccuccac

SEQ ID NO: 1952 - RNA, 21 nt, Artificial Sequence
  SARM1 targeting guide sequence portion
cagcagccgcaacagcagguc

SEQ ID NO: 1953 - RNA, 21 nt, Artificial Sequence
  SARM1 targeting guide sequence portion
cagcaggccuuguccgcgcug

SEQ ID NO: 1954 - RNA, 21 nt, Artificial Sequence
  SARM1 targeting guide sequence portion
cagcaggcgcgcggccugcac

SEQ ID NO: 1955 - RNA, 21 nt, Artificial Sequence
  SARM1 targeting guide sequence portion
cagcaggucgaggccgccauc

SEQ ID NO: 1956 - RNA, 21 nt, Artificial Sequence
  SARM1 targeting guide sequence portion
cagccaccaggaucugcucca

SEQ ID NO: 1957 - RNA, 21 nt, Artificial Sequence
  SARM1 targeting guide sequence portion
cagccaggccuccuccaccag

SEQ ID NO: 1958 - RNA, 21 nt, Artificial Sequence
  SARM1 targeting guide sequence portion
cagccgcaacagcaggucgag

SEQ ID NO: 1959 - RNA, 21 nt, Artificial Sequence
  SARM1 targeting guide sequence portion
cagcgcgcgcuccagggcguc

SEQ ID NO: 1960 - RNA, 21 nt, Artificial Sequence
  SARM1 targeting guide sequence portion
cagcgcggacaaggccugcug

SEQ ID NO: 1961 - RNA, 21 nt, Artificial Sequence
  SARM1 targeting guide sequence portion
cagcuccggcagcgcgcgcuc

SEQ ID NO: 1962 - RNA, 21 nt, Artificial Sequence
  SARM1 targeting guide sequence portion
cagcuuguaggcggagagaag

SEQ ID NO: 1963 - RNA, 21 nt, Artificial Sequence
  SARM1 targeting guide sequence portion
caggacgcccuggagcgcgcg

SEQ ID NO: 1964 - RNA, 21 nt, Artificial Sequence
  SARM1 targeting guide sequence portion
caggaucugcuccagcaggcg

SEQ ID NO: 1965 - RNA, 21 nt, Artificial Sequence
  SARM1 targeting guide sequence portion
caggcaccgaggugcaggacg

SEQ ID NO: 1966 - RNA, 21 nt, Artificial Sequence
  SARM1 targeting guide sequence portion
caggccgcgcgccugcuggag

SEQ ID NO: 1967 - RNA, 21 nt, Artificial Sequence
  SARM1 targeting guide sequence portion
caggccuccuccaccaguugg

SEQ ID NO: 1968 - RNA, 21 nt, Artificial Sequence
  SARM1 targeting guide sequence portion
caggccuuguccgcgcugaag

SEQ ID NO: 1969 - RNA, 21 nt, Artificial Sequence
  SARM1 targeting guide sequence portion
caggcgccggaguuggagacg

SEQ ID NO: 1970 - RNA, 21 nt, Artificial Sequence
  SARM1 targeting guide sequence portion
caggcgcgcggccugcacacg

SEQ ID NO: 1971 - RNA, 21 nt, Artificial Sequence
  SARM1 targeting guide sequence portion
cagggcguccugcaccucggu

SEQ ID NO: 1972 - RNA, 21 nt, Artificial Sequence
  SARM1 targeting guide sequence portion
cagggucugugcgacgccauc

SEQ ID NO: 1973 - RNA, 21 nt, Artificial Sequence
  SARM1 targeting guide sequence portion
caggucgaggccgccaucgag

SEQ ID NO: 1974 - RNA, 21 nt, Artificial Sequence
  SARM1 targeting guide sequence portion
caguuggaagaccucggccag

SEQ ID NO: 1975 - RNA, 21 nt, Artificial Sequence
  SARM1 targeting guide sequence portion
cauccgccucgauggcggccu

SEQ ID NO: 1976 - RNA, 21 nt, Artificial Sequence
  SARM1 targeting guide sequence portion
caucgaggcggauggcgucgc

SEQ ID NO: 1977 - RNA, 21 nt, Artificial Sequence
  SARM1 targeting guide sequence portion
caucuggcccaggcaccgcca

SEQ ID NO: 1978 - RNA, 21 nt, Artificial Sequence
  SARM1 targeting guide sequence portion
cauggcgaagaagcgacacag

SEQ ID NO: 1979 - RNA, 21 nt, Artificial Sequence
  SARM1 targeting guide sequence portion
caugggcccgugccaccgccc

SEQ ID NO: 1980 - RNA, 21 nt, Artificial Sequence
  SARM1 targeting guide sequence portion
caugucgggcccacggccggg

SEQ ID NO: 1981 - RNA, 21 nt, Artificial Sequence
  SARM1 targeting guide sequence portion
ccaacuccggcgccugcagca

SEQ ID NO: 1982 - RNA, 21 nt, Artificial Sequence
  SARM1 targeting guide sequence portion
ccaacugguggaggaggccug

SEQ ID NO: 1983 - RNA, 21 nt, Artificial Sequence
  SARM1 targeting guide sequence portion
ccaccaggaucugcuccagca

SEQ ID NO: 1984 - RNA, 21 nt, Artificial Sequence
  SARM1 targeting guide sequence portion
ccaccaguuggaagaccucgg

SEQ ID NO: 1985 - RNA, 21 nt, Artificial Sequence
  SARM1 targeting guide sequence portion
ccaccaugggcccgugccacc

SEQ ID NO: 1986 - RNA, 21 nt, Artificial Sequence
  SARM1 targeting guide sequence portion
ccaccgcccccaucuggccca

SEQ ID NO: 1987 - RNA, 21 nt, Artificial Sequence
  SARM1 targeting guide sequence portion
ccagaugggggcgguggcacg

SEQ ID NO: 1988 - RNA, 21 nt, Artificial Sequence
  SARM1 targeting guide sequence portion
ccagcaggcgcgcggccugca

SEQ ID NO: 1989 - RNA, 21 nt, Artificial Sequence
  SARM1 targeting guide sequence portion
ccaggaucugcuccagcaggc

SEQ ID NO: 1990 - RNA, 21 nt, Artificial Sequence
  SARM1 targeting guide sequence portion
ccaggccuccuccaccaguug

SEQ ID NO: 1991 - RNA, 21 nt, Artificial Sequence
  SARM1 targeting guide sequence portion
ccagggcguccugcaccucgg

SEQ ID NO: 1992 - RNA, 21 nt, Artificial Sequence
  SARM1 targeting guide sequence portion
ccagggucugugcgacgccau

SEQ ID NO: 1993 - RNA, 21 nt, Artificial Sequence
  SARM1 targeting guide sequence portion
ccaguuggaagaccucggcca

SEQ ID NO: 1994 - RNA, 21 nt, Artificial Sequence
  SARM1 targeting guide sequence portion
ccauccgccucgauggcggcc

SEQ ID NO: 1995 - RNA, 21 nt, Artificial Sequence
  SARM1 targeting guide sequence portion
ccaucgaggcggauggcgucg

SEQ ID NO: 1996 - RNA, 21 nt, Artificial Sequence
  SARM1 targeting guide sequence portion
ccaucuggcccaggcaccgcc

SEQ ID NO: 1997 - RNA, 21 nt, Artificial Sequence
  SARM1 targeting guide sequence portion
ccaugggcccgugccaccgcc

SEQ ID NO: 1998 - RNA, 21 nt, Artificial Sequence
  SARM1 targeting guide sequence portion
cccaccaugggcccgugccac

SEQ ID NO: 1999 - RNA, 21 nt, Artificial Sequence
  SARM1 targeting guide sequence portion
cccagggucugugcgacgcca

SEQ ID NO: 2000 - RNA, 21 nt, Artificial Sequence
  SARM1 targeting guide sequence portion
cccaucuggcccaggcaccgc

SEQ ID NO: 2001 - RNA, 21 nt, Artificial Sequence
  SARM1 targeting guide sequence portion
ccccaucuggcccaggcaccg

SEQ ID NO: 2002 - RNA, 21 nt, Artificial Sequence
  SARM1 targeting guide sequence portion
cccccaucuggcccaggcacc

SEQ ID NO: 2003 - RNA, 21 nt, Artificial Sequence
  SARM1 targeting guide sequence portion
ccccgcgaagugucgccgggg

SEQ ID NO: 2004 - RNA, 21 nt, Artificial Sequence
  SARM1 targeting guide sequence portion
cccgacauggcgaagaagcga

SEQ ID NO: 2005 - RNA, 21 nt, Artificial Sequence
  SARM1 targeting guide sequence portion
cccgccugcuucagcgcggac

SEQ ID NO: 2006 - RNA, 21 nt, Artificial Sequence
  SARM1 targeting guide sequence portion
cccgcgaagugucgccggggg

SEQ ID NO: 2007 - RNA, 21 nt, Artificial Sequence
  SARM1 targeting guide sequence portion
cccgcggccacccgcagccca

SEQ ID NO: 2008 - RNA, 21 nt, Artificial Sequence
  SARM1 targeting guide sequence portion
cccggccgugggcccgacaug

SEQ ID NO: 2009 - RNA, 21 nt, Artificial Sequence
  SARM1 targeting guide sequence portion
cccgugccaccgcccccaucu

SEQ ID NO: 2010 - RNA, 21 nt, Artificial Sequence
  SARM1 targeting guide sequence portion
cccuggagcgcgcgcugccgg

SEQ ID NO: 2011 - RNA, 21 nt, Artificial Sequence
  SARM1 targeting guide sequence portion
cccugggcuaccucgcggccc

SEQ ID NO: 2012 - RNA, 21 nt, Artificial Sequence
  SARM1 targeting guide sequence portion
ccgacauggcgaagaagcgac

SEQ ID NO: 2013 - RNA, 21 nt, Artificial Sequence
  SARM1 targeting guide sequence portion
ccgagcggcuggcggugccug

SEQ ID NO: 2014 - RNA, 21 nt, Artificial Sequence
  SARM1 targeting guide sequence portion
ccgaggucuuccaacuggugg

SEQ ID NO: 2015 - RNA, 21 nt, Artificial Sequence
  SARM1 targeting guide sequence portion
ccgaggugcaggacgcccugg

SEQ ID NO: 2016 - RNA, 21 nt, Artificial Sequence
  SARM1 targeting guide sequence portion
ccgcaacagcaggucgaggcc

SEQ ID NO: 2017 - RNA, 21 nt, Artificial Sequence
  SARM1 targeting guide sequence portion
ccgccaucgaggcggauggcg

SEQ ID NO: 2018 - RNA, 21 nt, Artificial Sequence
  SARM1 targeting guide sequence portion
ccgcccccaucuggcccaggc

SEQ ID NO: 2019 - RNA, 21 nt, Artificial Sequence
  SARM1 targeting guide sequence portion
ccgcccgccugcuucagcgcg

SEQ ID NO: 2020 - RNA, 21 nt, Artificial Sequence
  SARM1 targeting guide sequence portion
ccgccuacaagcugugucgcu

SEQ ID NO: 2021 - RNA, 21 nt, Artificial Sequence
  SARM1 targeting guide sequence portion
ccgccucgauggcggccucga

SEQ ID NO: 2022 - RNA, 21 nt, Artificial Sequence
  SARM1 targeting guide sequence portion
ccgccugcuucagcgcggaca

SEQ ID NO: 2023 - RNA, 21 nt, Artificial Sequence
  SARM1 targeting guide sequence portion
ccgcgaagugucgccgggggc

SEQ ID NO: 2024 - RNA, 21 nt, Artificial Sequence
  SARM1 targeting guide sequence portion
ccgcgagguagcccagggucu

SEQ ID NO: 2025 - RNA, 21 nt, Artificial Sequence
  SARM1 targeting guide sequence portion
ccgcgcgccugcuggagcaga

SEQ ID NO: 2026 - RNA, 21 nt, Artificial Sequence
  SARM1 targeting guide sequence portion
ccgcggccacccgcagcccac

SEQ ID NO: 2027 - RNA, 21 nt, Artificial Sequence
  SARM1 targeting guide sequence portion
ccggagcugcagcaggccuug

SEQ ID NO: 2028 - RNA, 21 nt, Artificial Sequence
  SARM1 targeting guide sequence portion
ccggaguuggagacgcgugug

SEQ ID NO: 2029 - RNA, 21 nt, Artificial Sequence
  SARM1 targeting guide sequence portion
ccggcagcgcgcgcuccaggg

SEQ ID NO: 2030 - RNA, 21 nt, Artificial Sequence
  SARM1 targeting guide sequence portion
ccggccgugggcccgacaugg

SEQ ID NO: 2031 - RNA, 21 nt, Artificial Sequence
  SARM1 targeting guide sequence portion
ccggccuggccgaggucuucc

SEQ ID NO: 2032 - RNA, 21 nt, Artificial Sequence
  SARM1 targeting guide sequence portion
ccggcgccugcagcagccgca

SEQ ID NO: 2033 - RNA, 21 nt, Artificial Sequence
  SARM1 targeting guide sequence portion
ccgggggcaggcaccgaggug

SEQ ID NO: 2034 - RNA, 21 nt, Artificial Sequence
  SARM1 targeting guide sequence portion
ccgguucucagccaccaggau

SEQ ID NO: 2035 - RNA, 21 nt, Artificial Sequence
  SARM1 targeting guide sequence portion
ccgugccaccgcccccaucug

SEQ ID NO: 2036 - RNA, 21 nt, Artificial Sequence
  SARM1 targeting guide sequence portion
ccgugggcccgacauggcgaa

SEQ ID NO: 2037 - RNA, 21 nt, Artificial Sequence
  SARM1 targeting guide sequence portion
ccgugggccgcgagguagccc

SEQ ID NO: 2038 - RNA, 21 nt, Artificial Sequence
  SARM1 targeting guide sequence portion
ccgugggcgccggccuggccg

SEQ ID NO: 2039 - RNA, 21 nt, Artificial Sequence
  SARM1 targeting guide sequence portion
ccuacaagcugugucgcuucu

SEQ ID NO: 2040 - RNA, 21 nt, Artificial Sequence
  SARM1 targeting guide sequence portion
ccuccaccaguuggaagaccu

SEQ ID NO: 2041 - RNA, 21 nt, Artificial Sequence
  SARM1 targeting guide sequence portion
ccuccuccaccaguuggaaga

SEQ ID NO: 2042 - RNA, 21 nt, Artificial Sequence
  SARM1 targeting guide sequence portion
ccucgaccugcuguugcggcu

SEQ ID NO: 2043 - RNA, 21 nt, Artificial Sequence
  SARM1 targeting guide sequence portion
ccucgauggcggccucgaccu

SEQ ID NO: 2044 - RNA, 21 nt, Artificial Sequence
  SARM1 targeting guide sequence portion
ccucggugccugcccccggcg

SEQ ID NO: 2045 - RNA, 21 nt, Artificial Sequence
  SARM1 targeting guide sequence portion
ccugacgcugcuucucuccgc

SEQ ID NO: 2046 - RNA, 21 nt, Artificial Sequence
  SARM1 targeting guide sequence portion
ccugcacacgcgucuccaacu

SEQ ID NO: 2047 - RNA, 21 nt, Artificial Sequence
  SARM1 targeting guide sequence portion
ccugcaccucggugccugccc

SEQ ID NO: 2048 - RNA, 21 nt, Artificial Sequence
  SARM1 targeting guide sequence portion
ccugcagcagccgcaacagca

SEQ ID NO: 2049 - RNA, 21 nt, Artificial Sequence
  SARM1 targeting guide sequence portion
ccugcccccggcgacacuucg

SEQ ID NO: 2050 - RNA, 21 nt, Artificial Sequence
  SARM1 targeting guide sequence portion
ccugcugcagcuccggcagcg

SEQ ID NO: 2051 - RNA, 21 nt, Artificial Sequence
  SARM1 targeting guide sequence portion
ccugcuggagcagauccuggu

SEQ ID NO: 2052 - RNA, 21 nt, Artificial Sequence
  SARM1 targeting guide sequence portion
ccugcuguugcggcugcugca

SEQ ID NO: 2053 - RNA, 21 nt, Artificial Sequence
  SARM1 targeting guide sequence portion
ccugcuucagcgcggacaagg

SEQ ID NO: 2054 - RNA, 21 nt, Artificial Sequence
  SARM1 targeting guide sequence portion
ccuggagcgcgcgcugccgga

SEQ ID NO: 2055 - RNA, 21 nt, Artificial Sequence
  SARM1 targeting guide sequence portion
ccuggccgaggucuuccaacu

SEQ ID NO: 2056 - RNA, 21 nt, Artificial Sequence
  SARM1 targeting guide sequence portion
ccugggccagaugggggcggu

SEQ ID NO: 2057 - RNA, 21 nt, Artificial Sequence
  SARM1 targeting guide sequence portion
ccuuguccgcgcugaagcagg

SEQ ID NO: 2058 - RNA, 21 nt, Artificial Sequence
  SARM1 targeting guide sequence portion
cgaagaagcgacacagcuugu

SEQ ID NO: 2059 - RNA, 21 nt, Artificial Sequence
  SARM1 targeting guide sequence portion
cgaagugucgccgggggcagg

SEQ ID NO: 2060 - RNA, 21 nt, Artificial Sequence
  SARM1 targeting guide sequence portion
cgacacagcuuguaggcggag

SEQ ID NO: 2061 - RNA, 21 nt, Artificial Sequence
  SARM1 targeting guide sequence portion
cgacacuucgcggggcccgcg

SEQ ID NO: 2062 - RNA, 21 nt, Artificial Sequence
  SARM1 targeting guide sequence portion
cgacauggcgaagaagcgaca

SEQ ID NO: 2063 - RNA, 21 nt, Artificial Sequence
  SARM1 targeting guide sequence portion
cgaccugcuguugcggcugcu

SEQ ID NO: 2064 - RNA, 21 nt, Artificial Sequence
  SARM1 targeting guide sequence portion
cgacgccauccgccucgaugg

SEQ ID NO: 2065 - RNA, 21 nt, Artificial Sequence
  SARM1 targeting guide sequence portion
cgagcggcuggcggugccugg

SEQ ID NO: 2066 - RNA, 21 nt, Artificial Sequence
  SARM1 targeting guide sequence portion
cgaggccgccaucgaggcgga

SEQ ID NO: 2067 - RNA, 21 nt, Artificial Sequence
  SARM1 targeting guide sequence portion
cgaggcggauggcgucgcaca

SEQ ID NO: 2068 - RNA, 21 nt, Artificial Sequence
  SARM1 targeting guide sequence portion
cgagguagcccagggucugug

SEQ ID NO: 2069 - RNA, 21 nt, Artificial Sequence
  SARM1 targeting guide sequence portion
cgaggucuuccaacuggugga

SEQ ID NO: 2070 - RNA, 21 nt, Artificial Sequence
  SARM1 targeting guide sequence portion
cgaggugcaggacgcccugga

SEQ ID NO: 2071 - RNA, 21 nt, Artificial Sequence
  SARM1 targeting guide sequence portion
cgauggcggccucgaccugcu

SEQ ID NO: 2072 - RNA, 21 nt, Artificial Sequence
  SARM1 targeting guide sequence portion
cgcaacagcaggucgaggccg

SEQ ID NO: 2073 - RNA, 21 nt, Artificial Sequence
  SARM1 targeting guide sequence portion
cgcacagacccugggcuaccu

SEQ ID NO: 2074 - RNA, 21 nt, Artificial Sequence
  SARM1 targeting guide sequence portion
cgccauccgccucgauggcgg

SEQ ID NO: 2075 - RNA, 21 nt, Artificial Sequence
  SARM1 targeting guide sequence portion
cgccaucgaggcggauggcgu

SEQ ID NO: 2076 - RNA, 21 nt, Artificial Sequence
  SARM1 targeting guide sequence portion
cgcccccaucuggcccaggca

SEQ ID NO: 2077 - RNA, 21 nt, Artificial Sequence
  SARM1 targeting guide sequence portion
cgcccgccugcuucagcgcgg

SEQ ID NO: 2078 - RNA, 21 nt, Artificial Sequence
  SARM1 targeting guide sequence portion
cgcccggccgugggcccgaca

SEQ ID NO: 2079 - RNA, 21 nt, Artificial Sequence
  SARM1 targeting guide sequence portion
cgcccuggagcgcgcgcugcc

SEQ ID NO: 2080 - RNA, 21 nt, Artificial Sequence
  SARM1 targeting guide sequence portion
cgccgcccgccugcuucagcg

SEQ ID NO: 2081 - RNA, 21 nt, Artificial Sequence
  SARM1 targeting guide sequence portion
cgccggaguuggagacgcgug

SEQ ID NO: 2082 - RNA, 21 nt, Artificial Sequence
  SARM1 targeting guide sequence portion
cgccggccuggccgaggucuu

SEQ ID NO: 2083 - RNA, 21 nt, Artificial Sequence
  SARM1 targeting guide sequence portion
cgccgggggcaggcaccgagg

SEQ ID NO: 2084 - RNA, 21 nt, Artificial Sequence
  SARM1 targeting guide sequence portion
cgccuacaagcugugucgcuu

SEQ ID NO: 2085 - RNA, 21 nt, Artificial Sequence
  SARM1 targeting guide sequence portion
cgccucgauggcggccucgac

SEQ ID NO: 2086 - RNA, 21 nt, Artificial Sequence
  SARM1 targeting guide sequence portion
cgccugcagcagccgcaacag

SEQ ID NO: 2087 - RNA, 21 nt, Artificial Sequence
  SARM1 targeting guide sequence portion
cgccugcuggagcagauccug

SEQ ID NO: 2088 - RNA, 21 nt, Artificial Sequence
  SARM1 targeting guide sequence portion
cgccugcuucagcgcggacaa

SEQ ID NO: 2089 - RNA, 21 nt, Artificial Sequence
  SARM1 targeting guide sequence portion
cgcgaagugucgccgggggca

SEQ ID NO: 2090 - RNA, 21 nt, Artificial Sequence
  SARM1 targeting guide sequence portion
cgcgagguagcccagggucug

SEQ ID NO: 2091 - RNA, 21 nt, Artificial Sequence
  SARM1 targeting guide sequence portion
cgcgccgcccgccugcuucag

SEQ ID NO: 2092 - RNA, 21 nt, Artificial Sequence
  SARM1 targeting guide sequence portion
cgcgccugcuggagcagaucc

SEQ ID NO: 2093 - RNA, 21 nt, Artificial Sequence
  SARM1 targeting guide sequence portion
cgcgcgccugcuggagcagau

SEQ ID NO: 2094 - RNA, 21 nt, Artificial Sequence
  SARM1 targeting guide sequence portion
cgcgcgcuccagggcguccug

SEQ ID NO: 2095 - RNA, 21 nt, Artificial Sequence
  SARM1 targeting guide sequence portion
cgcgcgcugccggagcugcag

SEQ ID NO: 2096 - RNA, 21 nt, Artificial Sequence
  SARM1 targeting guide sequence portion
cgcgcggccugcacacgcguc

SEQ ID NO: 2097 - RNA, 21 nt, Artificial Sequence
  SARM1 targeting guide sequence portion
cgcgcuccagggcguccugca

SEQ ID NO: 2098 - RNA, 21 nt, Artificial Sequence
  SARM1 targeting guide sequence portion
cgcgcugccggagcugcagca

SEQ ID NO: 2099 - RNA, 21 nt, Artificial Sequence
  SARM1 targeting guide sequence portion
cgcggacaaggccugcugcag

SEQ ID NO: 2100 - RNA, 21 nt, Artificial Sequence
  SARM1 targeting guide sequence portion
cgcggccacccgcagcccacc

SEQ ID NO: 2101 - RNA, 21 nt, Artificial Sequence
  SARM1 targeting guide sequence portion
cgcggccugcacacgcgucuc

SEQ ID NO: 2102 - RNA, 21 nt, Artificial Sequence
  SARM1 targeting guide sequence portion
cgcgucuccaacuccggcgcc

SEQ ID NO: 2103 - RNA, 21 nt, Artificial Sequence
  SARM1 targeting guide sequence portion
cgcgugugcaggccgcgcgcc

SEQ ID NO: 2104 - RNA, 21 nt, Artificial Sequence
  SARM1 targeting guide sequence portion
cgcucaccgguucucagccac

SEQ ID NO: 2105 - RNA, 21 nt, Artificial Sequence
  SARM1 targeting guide sequence portion
cgcuccagggcguccugcacc

SEQ ID NO: 2106 - RNA, 21 nt, Artificial Sequence
  SARM1 targeting guide sequence portion
cgcugccggagcugcagcagg

SEQ ID NO: 2107 - RNA, 21 nt, Artificial Sequence
  SARM1 targeting guide sequence portion
cgcugcuucucuccgccuaca

SEQ ID NO: 2108 - RNA, 21 nt, Artificial Sequence
  SARM1 targeting guide sequence portion
cgcuucuucgccaugucgggc

SEQ ID NO: 2109 - RNA, 21 nt, Artificial Sequence
  SARM1 targeting guide sequence portion
cggacaaggccugcugcagcu

SEQ ID NO: 2110 - RNA, 21 nt, Artificial Sequence
  SARM1 targeting guide sequence portion
cggagcugcagcaggccuugu

SEQ ID NO: 2111 - RNA, 21 nt, Artificial Sequence
  SARM1 targeting guide sequence portion
cggaguuggagacgcgugugc

SEQ ID NO: 2112 - RNA, 21 nt, Artificial Sequence
  SARM1 targeting guide sequence portion
cggauggcgucgcacagaccc

SEQ ID NO: 2113 - RNA, 21 nt, Artificial Sequence
  SARM1 targeting guide sequence portion
cggcagcgcgcgcuccagggc

SEQ ID NO: 2114 - RNA, 21 nt, Artificial Sequence
  SARM1 targeting guide sequence portion
cggccgugggcccgacauggc

SEQ ID NO: 2115 - RNA, 21 nt, Artificial Sequence
  SARM1 targeting guide sequence portion
cggccucgaccugcuguugcg

SEQ ID NO: 2116 - RNA, 21 nt, Artificial Sequence
  SARM1 targeting guide sequence portion
cggccugcacacgcgucucca

SEQ ID NO: 2117 - RNA, 21 nt, Artificial Sequence
  SARM1 targeting guide sequence portion
cggccuggccgaggucuucca

SEQ ID NO: 2118 - RNA, 21 nt, Artificial Sequence
  SARM1 targeting guide sequence portion
cggcgccugcagcagccgcaa

SEQ ID NO: 2119 - RNA, 21 nt, Artificial Sequence
  SARM1 targeting guide sequence portion
cggcugcugcaggcgccggag

SEQ ID NO: 2120 - RNA, 21 nt, Artificial Sequence
  SARM1 targeting guide sequence portion
cggcuggcggugccugggcca

SEQ ID NO: 2121 - RNA, 21 nt, Artificial Sequence
  SARM1 targeting guide sequence portion
cgggggcaggcaccgaggugc

SEQ ID NO: 2122 - RNA, 21 nt, Artificial Sequence
  SARM1 targeting guide sequence portion
cggguggccgcgggccccgcg

SEQ ID NO: 2123 - RNA, 21 nt, Artificial Sequence
  SARM1 targeting guide sequence portion
cggugccugcccccggcgaca

SEQ ID NO: 2124 - RNA, 21 nt, Artificial Sequence
  SARM1 targeting guide sequence portion
cggugccugggccagaugggg

SEQ ID NO: 2125 - RNA, 21 nt, Artificial Sequence
  SARM1 targeting guide sequence portion
cgguucucagccaccaggauc

SEQ ID NO: 2126 - RNA, 21 nt, Artificial Sequence
  SARM1 targeting guide sequence portion
cguccugcaccucggugccug

SEQ ID NO: 2127 - RNA, 21 nt, Artificial Sequence
  SARM1 targeting guide sequence portion
cgucgcacagacccugggcua

SEQ ID NO: 2128 - RNA, 21 nt, Artificial Sequence
  SARM1 targeting guide sequence portion
cgucuccaacuccggcgccug

SEQ ID NO: 2129 - RNA, 21 nt, Artificial Sequence
  SARM1 targeting guide sequence portion
cgugccaccgcccccaucugg

SEQ ID NO: 2130 - RNA, 21 nt, Artificial Sequence
  SARM1 targeting guide sequence portion
cgugggcccgacauggcgaag

SEQ ID NO: 2131 - RNA, 21 nt, Artificial Sequence
  SARM1 targeting guide sequence portion
cgugggccgcgagguagccca

SEQ ID NO: 2132 - RNA, 21 nt, Artificial Sequence
  SARM1 targeting guide sequence portion
cgugggcgccggccuggccga

SEQ ID NO: 2133 - RNA, 21 nt, Artificial Sequence
  SARM1 targeting guide sequence portion
cgugugcaggccgcgcgccug

SEQ ID NO: 2134 - RNA, 21 nt, Artificial Sequence
  SARM1 targeting guide sequence portion
cuacaagcugugucgcuucuu

SEQ ID NO: 2135 - RNA, 21 nt, Artificial Sequence
  SARM1 targeting guide sequence portion
cucaccgguucucagccacca

SEQ ID NO: 2136 - RNA, 21 nt, Artificial Sequence
  SARM1 targeting guide sequence portion
cucagccaccaggaucugcuc

SEQ ID NO: 2137 - RNA, 21 nt, Artificial Sequence
  SARM1 targeting guide sequence portion
cuccaacuccggcgccugcag

SEQ ID NO: 2138 - RNA, 21 nt, Artificial Sequence
  SARM1 targeting guide sequence portion
cuccaccaguuggaagaccuc

SEQ ID NO: 2139 - RNA, 21 nt, Artificial Sequence
  SARM1 targeting guide sequence portion
cuccagcaggcgcgcggccug

SEQ ID NO: 2140 - RNA, 21 nt, Artificial Sequence
  SARM1 targeting guide sequence portion
cuccagggcguccugcaccuc

SEQ ID NO: 2141 - RNA, 21 nt, Artificial Sequence
  SARM1 targeting guide sequence portion
cuccgccuacaagcugugucg

SEQ ID NO: 2142 - RNA, 21 nt, Artificial Sequence
  SARM1 targeting guide sequence portion
cuccggcagcgcgcgcuccag

SEQ ID NO: 2143 - RNA, 21 nt, Artificial Sequence
  SARM1 targeting guide sequence portion
cuccggcgccugcagcagccg

SEQ ID NO: 2144 - RNA, 21 nt, Artificial Sequence
  SARM1 targeting guide sequence portion
cuccuccaccaguuggaagac

SEQ ID NO: 2145 - RNA, 21 nt, Artificial Sequence
  SARM1 targeting guide sequence portion
cucgaccugcuguugcggcug

SEQ ID NO: 2146 - RNA, 21 nt, Artificial Sequence
  SARM1 targeting guide sequence portion
cucgauggcggccucgaccug

SEQ ID NO: 2147 - RNA, 21 nt, Artificial Sequence
  SARM1 targeting guide sequence portion
cucgcggcccacggccggcag

SEQ ID NO: 2148 - RNA, 21 nt, Artificial Sequence
  SARM1 targeting guide sequence portion
cucggcgcccggccgugggcc

SEQ ID NO: 2149 - RNA, 21 nt, Artificial Sequence
  SARM1 targeting guide sequence portion
cucggugccugcccccggcga

SEQ ID NO: 2150 - RNA, 21 nt, Artificial Sequence
  SARM1 targeting guide sequence portion
cucuccgccuacaagcugugu

SEQ ID NO: 2151 - RNA, 21 nt, Artificial Sequence
  SARM1 targeting guide sequence portion
cugacgcugcuucucuccgcc

SEQ ID NO: 2152 - RNA, 21 nt, Artificial Sequence
  SARM1 targeting guide sequence portion
cugcacacgcgucuccaacuc

SEQ ID NO: 2153 - RNA, 21 nt, Artificial Sequence
  SARM1 targeting guide sequence portion
cugcaccucggugccugcccc

SEQ ID NO: 2154 - RNA, 21 nt, Artificial Sequence
  SARM1 targeting guide sequence portion
cugcagcagccgcaacagcag

SEQ ID NO: 2155 - RNA, 21 nt, Artificial Sequence
  SARM1 targeting guide sequence portion
cugcagcaggccuuguccgcg

SEQ ID NO: 2156 - RNA, 21 nt, Artificial Sequence
  SARM1 targeting guide sequence portion
cugcagcuccggcagcgcgcg

SEQ ID NO: 2157 - RNA, 21 nt, Artificial Sequence
  SARM1 targeting guide sequence portion
cugcaggcgccggaguuggag

SEQ ID NO: 2158 - RNA, 21 nt, Artificial Sequence
  SARM1 targeting guide sequence portion
cugcccccggcgacacuucgc

SEQ ID NO: 2159 - RNA, 21 nt, Artificial Sequence
  SARM1 targeting guide sequence portion
cugccggagcugcagcaggcc

SEQ ID NO: 2160 - RNA, 21 nt, Artificial Sequence
  SARM1 targeting guide sequence portion
cugccggccgugggccgcgag

SEQ ID NO: 2161 - RNA, 21 nt, Artificial Sequence
  SARM1 targeting guide sequence portion
cugcuccagcaggcgcgcggc

SEQ ID NO: 2162 - RNA, 21 nt, Artificial Sequence
  SARM1 targeting guide sequence portion
cugcugcagcuccggcagcgc

SEQ ID NO: 2163 - RNA, 21 nt, Artificial Sequence
  SARM1 targeting guide sequence portion
cugcugcaggcgccggaguug

SEQ ID NO: 2164 - RNA, 21 nt, Artificial Sequence
  SARM1 targeting guide sequence portion
cugcugccggccgugggccgc

SEQ ID NO: 2165 - RNA, 21 nt, Artificial Sequence
  SARM1 targeting guide sequence portion
cugcuggagcagauccuggug

SEQ ID NO: 2166 - RNA, 21 nt, Artificial Sequence
  SARM1 targeting guide sequence portion
cugcuguugcggcugcugcag

SEQ ID NO: 2167 - RNA, 21 nt, Artificial Sequence
  SARM1 targeting guide sequence portion
cugcuucagcgcggacaaggc

SEQ ID NO: 2168 - RNA, 21 nt, Artificial Sequence
  SARM1 targeting guide sequence portion
cugcuucucuccgccuacaag

SEQ ID NO: 2169 - RNA, 21 nt, Artificial Sequence
  SARM1 targeting guide sequence portion
cuggagcagauccugguggcu

SEQ ID NO: 2170 - RNA, 21 nt, Artificial Sequence
  SARM1 targeting guide sequence portion
cuggagcgcgcgcugccggag

SEQ ID NO: 2171 - RNA, 21 nt, Artificial Sequence
  SARM1 targeting guide sequence portion
cuggcccaggcaccgccagcc

SEQ ID NO: 2172 - RNA, 21 nt, Artificial Sequence
  SARM1 targeting guide sequence portion
cuggccgaggucuuccaacug

SEQ ID NO: 2173 - RNA, 21 nt, Artificial Sequence
  SARM1 targeting guide sequence portion
cuggcggugccugggccagau

SEQ ID NO: 2174 - RNA, 21 nt, Artificial Sequence
  SARM1 targeting guide sequence portion
cugggccagaugggggcggug

SEQ ID NO: 2175 - RNA, 21 nt, Artificial Sequence
  SARM1 targeting guide sequence portion
cugugcgacgccauccgccuc

SEQ ID NO: 2176 - RNA, 21 nt, Artificial Sequence
  SARM1 targeting guide sequence portion
cugugucgcuucuucgccaug

SEQ ID NO: 2177 - RNA, 21 nt, Artificial Sequence
  SARM1 targeting guide sequence portion
cuguugcggcugcugcaggcg

SEQ ID NO: 2178 - RNA, 21 nt, Artificial Sequence
  SARM1 targeting guide sequence portion
cuucagcgcggacaaggccug

SEQ ID NO: 2179 - RNA, 21 nt, Artificial Sequence
  SARM1 targeting guide sequence portion
cuuccaacugguggaggaggc

SEQ ID NO: 2180 - RNA, 21 nt, Artificial Sequence
  SARM1 targeting guide sequence portion
cuucgccaugucgggcccacg

SEQ ID NO: 2181 - RNA, 21 nt, Artificial Sequence
  SARM1 targeting guide sequence portion
cuucucuccgccuacaagcug

SEQ ID NO: 2182 - RNA, 21 nt, Artificial Sequence
  SARM1 targeting guide sequence portion
cuucuucgccaugucgggccc

SEQ ID NO: 2183 - RNA, 21 nt, Artificial Sequence
  SARM1 targeting guide sequence portion
cuuguaggcggagagaagcag

SEQ ID NO: 2184 - RNA, 21 nt, Artificial Sequence
  SARM1 targeting guide sequence portion
cuuguccgcgcugaagcaggc

SEQ ID NO: 2185 - RNA, 21 nt, Artificial Sequence
  SARM1 targeting guide sequence portion
gaagaagcgacacagcuugua

SEQ ID NO: 2186 - RNA, 21 nt, Artificial Sequence
  SARM1 targeting guide sequence portion
gaagaccucggccaggccggc

SEQ ID NO: 2187 - RNA, 21 nt, Artificial Sequence
  SARM1 targeting guide sequence portion
gaagcgacacagcuuguaggc

SEQ ID NO: 2188 - RNA, 21 nt, Artificial Sequence
  SARM1 targeting guide sequence portion
gaagugucgccgggggcaggc

SEQ ID NO: 2189 - RNA, 21 nt, Artificial Sequence
  SARM1 targeting guide sequence portion
gacaaggccugcugcagcucc

SEQ ID NO: 2190 - RNA, 21 nt, Artificial Sequence
  SARM1 targeting guide sequence portion
gacacagcuuguaggcggaga

SEQ ID NO: 2191 - RNA, 21 nt, Artificial Sequence
  SARM1 targeting guide sequence portion
gacacuucgcggggcccgcgg

SEQ ID NO: 2192 - RNA, 21 nt, Artificial Sequence
  SARM1 targeting guide sequence portion
gacauggcgaagaagcgacac

SEQ ID NO: 2193 - RNA, 21 nt, Artificial Sequence
  SARM1 targeting guide sequence portion
gacccugggcuaccucgcggc

SEQ ID NO: 2194 - RNA, 21 nt, Artificial Sequence
  SARM1 targeting guide sequence portion
gaccugcuguugcggcugcug

SEQ ID NO: 2195 - RNA, 21 nt, Artificial Sequence
  SARM1 targeting guide sequence portion
gacgccauccgccucgauggc

SEQ ID NO: 2196 - RNA, 21 nt, Artificial Sequence
  SARM1 targeting guide sequence portion
gacgcccuggagcgcgcgcug

SEQ ID NO: 2197 - RNA, 21 nt, Artificial Sequence
  SARM1 targeting guide sequence portion
gacgcgugugcaggccgcgcg

SEQ ID NO: 2198 - RNA, 21 nt, Artificial Sequence
  SARM1 targeting guide sequence portion
gacgcugcuucucuccgccua

SEQ ID NO: 2199 - RNA, 21 nt, Artificial Sequence
  SARM1 targeting guide sequence portion
gagacgcgugugcaggccgcg

SEQ ID NO: 2200 - RNA, 21 nt, Artificial Sequence
  SARM1 targeting guide sequence portion
gagcagauccugguggcugag

SEQ ID NO: 2201 - RNA, 21 nt, Artificial Sequence
  SARM1 targeting guide sequence portion
gagcgcgcgcugccggagcug

SEQ ID NO: 2202 - RNA, 21 nt, Artificial Sequence
  SARM1 targeting guide sequence portion
gagcggcuggcggugccuggg

SEQ ID NO: 2203 - RNA, 21 nt, Artificial Sequence
  SARM1 targeting guide sequence portion
gagcugcagcaggccuugucc

SEQ ID NO: 2204 - RNA, 21 nt, Artificial Sequence
  SARM1 targeting guide sequence portion
gaggccgccaucgaggcggau

SEQ ID NO: 2205 - RNA, 21 nt, Artificial Sequence
  SARM1 targeting guide sequence portion
gaggcggauggcgucgcacag

SEQ ID NO: 2206 - RNA, 21 nt, Artificial Sequence
  SARM1 targeting guide sequence portion
gagguagcccagggucugugc

SEQ ID NO: 2207 - RNA, 21 nt, Artificial Sequence
  SARM1 targeting guide sequence portion
gaggucuuccaacugguggag

SEQ ID NO: 2208 - RNA, 21 nt, Artificial Sequence
  SARM1 targeting guide sequence portion
gaggugcaggacgcccuggag

SEQ ID NO: 2209 - RNA, 21 nt, Artificial Sequence
  SARM1 targeting guide sequence portion
gaguuggagacgcgugugcag

SEQ ID NO: 2210 - RNA, 21 nt, Artificial Sequence
  SARM1 targeting guide sequence portion
gauccugguggcugagaaccg

SEQ ID NO: 2211 - RNA, 21 nt, Artificial Sequence
  SARM1 targeting guide sequence portion
gaucugcuccagcaggcgcgc

SEQ ID NO: 2212 - RNA, 21 nt, Artificial Sequence
  SARM1 targeting guide sequence portion
gauggcggccucgaccugcug

SEQ ID NO: 2213 - RNA, 21 nt, Artificial Sequence
  SARM1 targeting guide sequence portion
gauggcgucgcacagacccug

SEQ ID NO: 2214 - RNA, 21 nt, Artificial Sequence
  SARM1 targeting guide sequence portion
gaugggggcgguggcacgggc

SEQ ID NO: 2215 - RNA, 21 nt, Artificial Sequence
  SARM1 targeting guide sequence portion
gcaacagcaggucgaggccgc

SEQ ID NO: 2216 - RNA, 21 nt, Artificial Sequence
  SARM1 targeting guide sequence portion
gcacacgcgucuccaacuccg

SEQ ID NO: 2217 - RNA, 21 nt, Artificial Sequence
  SARM1 targeting guide sequence portion
gcacagacccugggcuaccuc

SEQ ID NO: 2218 - RNA, 21 nt, Artificial Sequence
  SARM1 targeting guide sequence portion
gcaccgaggugcaggacgccc

SEQ ID NO: 2219 - RNA, 21 nt, Artificial Sequence
  SARM1 targeting guide sequence portion
gcaccucggugccugcccccg

SEQ ID NO: 2220 - RNA, 21 nt, Artificial Sequence
  SARM1 targeting guide sequence portion
gcagauccugguggcugagaa

SEQ ID NO: 2221 - RNA, 21 nt, Artificial Sequence
  SARM1 targeting guide sequence portion
gcagcagccaggccuccucca

SEQ ID NO: 2222 - RNA, 21 nt, Artificial Sequence
  SARM1 targeting guide sequence portion
gcagcagccgcaacagcaggu

SEQ ID NO: 2223 - RNA, 21 nt, Artificial Sequence
  SARM1 targeting guide sequence portion
gcagcaggccuuguccgcgcu

SEQ ID NO: 2224 - RNA, 21 nt, Artificial Sequence
  SARM1 targeting guide sequence portion
gcagccaggccuccuccacca

SEQ ID NO: 2225 - RNA, 21 nt, Artificial Sequence
  SARM1 targeting guide sequence portion
gcagccgcaacagcaggucga

SEQ ID NO: 2226 - RNA, 21 nt, Artificial Sequence
  SARM1 targeting guide sequence portion
gcagcgcgcgcuccagggcgu

SEQ ID NO: 2227 - RNA, 21 nt, Artificial Sequence
  SARM1 targeting guide sequence portion
gcagcuccggcagcgcgcgcu

SEQ ID NO: 2228 - RNA, 21 nt, Artificial Sequence
  SARM1 targeting guide sequence portion
gcaggacgcccuggagcgcgc

SEQ ID NO: 2229 - RNA, 21 nt, Artificial Sequence
  SARM1 targeting guide sequence portion
gcaggcaccgaggugcaggac

SEQ ID NO: 2230 - RNA, 21 nt, Artificial Sequence
  SARM1 targeting guide sequence portion
gcaggccgcgcgccugcugga

SEQ ID NO: 2231 - RNA, 21 nt, Artificial Sequence
  SARM1 targeting guide sequence portion
gcaggccuuguccgcgcugaa

SEQ ID NO: 2232 - RNA, 21 nt, Artificial Sequence
  SARM1 targeting guide sequence portion
gcaggcgccggaguuggagac

SEQ ID NO: 2233 - RNA, 21 nt, Artificial Sequence
  SARM1 targeting guide sequence portion
gcaggcgcgcggccugcacac

SEQ ID NO: 2234 - RNA, 21 nt, Artificial Sequence
  SARM1 targeting guide sequence portion
gcaggucgaggccgccaucga

SEQ ID NO: 2235 - RNA, 21 nt, Artificial Sequence
  SARM1 targeting guide sequence portion
gccaccaggaucugcuccagc

SEQ ID NO: 2236 - RNA, 21 nt, Artificial Sequence
  SARM1 targeting guide sequence portion
gccaccgcccccaucuggccc

SEQ ID NO: 2237 - RNA, 21 nt, Artificial Sequence
  SARM1 targeting guide sequence portion
gccagaugggggcgguggcac

SEQ ID NO: 2238 - RNA, 21 nt, Artificial Sequence
  SARM1 targeting guide sequence portion
gccaggccuccuccaccaguu

SEQ ID NO: 2239 - RNA, 21 nt, Artificial Sequence
  SARM1 targeting guide sequence portion
gccauccgccucgauggcggc

SEQ ID NO: 2240 - RNA, 21 nt, Artificial Sequence
  SARM1 targeting guide sequence portion
gccaucgaggcggauggcguc

SEQ ID NO: 2241 - RNA, 21 nt, Artificial Sequence
  SARM1 targeting guide sequence portion
gcccaccaugggcccgugcca

SEQ ID NO: 2242 - RNA, 21 nt, Artificial Sequence
  SARM1 targeting guide sequence portion
gcccagggucugugcgacgcc

SEQ ID NO: 2243 - RNA, 21 nt, Artificial Sequence
  SARM1 targeting guide sequence portion
gcccccaucuggcccaggcac

SEQ ID NO: 2244 - RNA, 21 nt, Artificial Sequence
  SARM1 targeting guide sequence portion
gccccgcgaagugucgccggg

SEQ ID NO: 2245 - RNA, 21 nt, Artificial Sequence
  SARM1 targeting guide sequence portion
gcccgacauggcgaagaagcg

SEQ ID NO: 2246 - RNA, 21 nt, Artificial Sequence
  SARM1 targeting guide sequence portion
gcccgccugcuucagcgcgga

SEQ ID NO: 2247 - RNA, 21 nt, Artificial Sequence
  SARM1 targeting guide sequence portion
gcccgcggccacccgcagccc

SEQ ID NO: 2248 - RNA, 21 nt, Artificial Sequence
  SARM1 targeting guide sequence portion
gcccggccgugggcccgacau

SEQ ID NO: 2249 - RNA, 21 nt, Artificial Sequence
  SARM1 targeting guide sequence portion
gcccgugccaccgcccccauc

SEQ ID NO: 2250 - RNA, 21 nt, Artificial Sequence
  SARM1 targeting guide sequence portion
gcccuggagcgcgcgcugccg

SEQ ID NO: 2251 - RNA, 21 nt, Artificial Sequence
  SARM1 targeting guide sequence portion
gccgagcggcuggcggugccu

SEQ ID NO: 2252 - RNA, 21 nt, Artificial Sequence
  SARM1 targeting guide sequence portion
gccgaggucuuccaacuggug

SEQ ID NO: 2253 - RNA, 21 nt, Artificial Sequence
  SARM1 targeting guide sequence portion
gccgcaacagcaggucgaggc

SEQ ID NO: 2254 - RNA, 21 nt, Artificial Sequence
  SARM1 targeting guide sequence portion
gccgccaucgaggcggauggc

SEQ ID NO: 2255 - RNA, 21 nt, Artificial Sequence
  SARM1 targeting guide sequence portion
gccgcccgccugcuucagcgc

SEQ ID NO: 2256 - RNA, 21 nt, Artificial Sequence
  SARM1 targeting guide sequence portion
gccgcgagguagcccaggguc

SEQ ID NO: 2257 - RNA, 21 nt, Artificial Sequence
  SARM1 targeting guide sequence portion
gccgcgcgccugcuggagcag

SEQ ID NO: 2258 - RNA, 21 nt, Artificial Sequence
  SARM1 targeting guide sequence portion
gccggagcugcagcaggccuu

SEQ ID NO: 2259 - RNA, 21 nt, Artificial Sequence
  SARM1 targeting guide sequence portion
gccggaguuggagacgcgugu

SEQ ID NO: 2260 - RNA, 21 nt, Artificial Sequence
  SARM1 targeting guide sequence portion
gccggccgugggccgcgaggu

SEQ ID NO: 2261 - RNA, 21 nt, Artificial Sequence
  SARM1 targeting guide sequence portion
gccggccuggccgaggucuuc

SEQ ID NO: 2262 - RNA, 21 nt, Artificial Sequence
  SARM1 targeting guide sequence portion
gccgggggcaggcaccgaggu

SEQ ID NO: 2263 - RNA, 21 nt, Artificial Sequence
  SARM1 targeting guide sequence portion
gccgugggcccgacauggcga

SEQ ID NO: 2264 - RNA, 21 nt, Artificial Sequence
  SARM1 targeting guide sequence portion
gccgugggccgcgagguagcc

SEQ ID NO: 2265 - RNA, 21 nt, Artificial Sequence
  SARM1 targeting guide sequence portion
gccuacaagcugugucgcuuc

SEQ ID NO: 2266 - RNA, 21 nt, Artificial Sequence
  SARM1 targeting guide sequence portion
gccuccuccaccaguuggaag

SEQ ID NO: 2267 - RNA, 21 nt, Artificial Sequence
  SARM1 targeting guide sequence portion
gccucgaccugcuguugcggc

SEQ ID NO: 2268 - RNA, 21 nt, Artificial Sequence
  SARM1 targeting guide sequence portion
gccucgauggcggccucgacc

SEQ ID NO: 2269 - RNA, 21 nt, Artificial Sequence
  SARM1 targeting guide sequence portion
gccugcacacgcgucuccaac

SEQ ID NO: 2270 - RNA, 21 nt, Artificial Sequence
  SARM1 targeting guide sequence portion
gccugcagcagccgcaacagc

SEQ ID NO: 2271 - RNA, 21 nt, Artificial Sequence
  SARM1 targeting guide sequence portion
gccugcccccggcgacacuuc

SEQ ID NO: 2272 - RNA, 21 nt, Artificial Sequence
  SARM1 targeting guide sequence portion
gccugcugcagcuccggcagc

SEQ ID NO: 2273 - RNA, 21 nt, Artificial Sequence
  SARM1 targeting guide sequence portion
gccugcuggagcagauccugg

SEQ ID NO: 2274 - RNA, 21 nt, Artificial Sequence
  SARM1 targeting guide sequence portion
gccugcuucagcgcggacaag

SEQ ID NO: 2275 - RNA, 21 nt, Artificial Sequence
  SARM1 targeting guide sequence portion
gccuggccgaggucuuccaac

SEQ ID NO: 2276 - RNA, 21 nt, Artificial Sequence
  SARM1 targeting guide sequence portion
gccugggccagaugggggcgg

SEQ ID NO: 2277 - RNA, 21 nt, Artificial Sequence
  SARM1 targeting guide sequence portion
gccuuguccgcgcugaagcag

SEQ ID NO: 2278 - RNA, 21 nt, Artificial Sequence
  SARM1 targeting guide sequence portion
gcgaagaagcgacacagcuug

SEQ ID NO: 2279 - RNA, 21 nt, Artificial Sequence
  SARM1 targeting guide sequence portion
gcgaagugucgccgggggcag

SEQ ID NO: 2280 - RNA, 21 nt, Artificial Sequence
  SARM1 targeting guide sequence portion
gcgacacagcuuguaggcgga

SEQ ID NO: 2281 - RNA, 21 nt, Artificial Sequence
  SARM1 targeting guide sequence portion
gcgacacuucgcggggcccgc

SEQ ID NO: 2282 - RNA, 21 nt, Artificial Sequence
  SARM1 targeting guide sequence portion
gcgacgccauccgccucgaug

SEQ ID NO: 2283 - RNA, 21 nt, Artificial Sequence
  SARM1 targeting guide sequence portion
gcgagguagcccagggucugu

SEQ ID NO: 2284 - RNA, 21 nt, Artificial Sequence
  SARM1 targeting guide sequence portion
gcgccgcccgccugcuucagc

SEQ ID NO: 2285 - RNA, 21 nt, Artificial Sequence
  SARM1 targeting guide sequence portion
gcgccggaguuggagacgcgu

SEQ ID NO: 2286 - RNA, 21 nt, Artificial Sequence
  SARM1 targeting guide sequence portion
gcgccggccuggccgaggucu

SEQ ID NO: 2287 - RNA, 21 nt, Artificial Sequence
  SARM1 targeting guide sequence portion
gcgccugcagcagccgcaaca

SEQ ID NO: 2288 - RNA, 21 nt, Artificial Sequence
  SARM1 targeting guide sequence portion
gcgccugcuggagcagauccu

SEQ ID NO: 2289 - RNA, 21 nt, Artificial Sequence
  SARM1 targeting guide sequence portion
gcgcgccugcuggagcagauc

SEQ ID NO: 2290 - RNA, 21 nt, Artificial Sequence
  SARM1 targeting guide sequence portion
gcgcgcgcuccagggcguccu

SEQ ID NO: 2291 - RNA, 21 nt, Artificial Sequence
  SARM1 targeting guide sequence portion
gcgcgcgcugccggagcugca

SEQ ID NO: 2292 - RNA, 21 nt, Artificial Sequence
  SARM1 targeting guide sequence portion
gcgcgcggccugcacacgcgu

SEQ ID NO: 2293 - RNA, 21 nt, Artificial Sequence
  SARM1 targeting guide sequence portion
gcgcgcuccagggcguccugc

SEQ ID NO: 2294 - RNA, 21 nt, Artificial Sequence
  SARM1 targeting guide sequence portion
gcgcgcugccggagcugcagc

SEQ ID NO: 2295 - RNA, 21 nt, Artificial Sequence
  SARM1 targeting guide sequence portion
gcgcggacaaggccugcugca

SEQ ID NO: 2296 - RNA, 21 nt, Artificial Sequence
  SARM1 targeting guide sequence portion
gcgcggccugcacacgcgucu

SEQ ID NO: 2297 - RNA, 21 nt, Artificial Sequence
  SARM1 targeting guide sequence portion
gcgcuccagggcguccugcac

SEQ ID NO: 2298 - RNA, 21 nt, Artificial Sequence
  SARM1 targeting guide sequence portion
gcgcugccggagcugcagcag

SEQ ID NO: 2299 - RNA, 21 nt, Artificial Sequence
  SARM1 targeting guide sequence portion
gcggacaaggccugcugcagc

SEQ ID NO: 2300 - RNA, 21 nt, Artificial Sequence
  SARM1 targeting guide sequence portion
gcggauggcgucgcacagacc

SEQ ID NO: 2301 - RNA, 21 nt, Artificial Sequence
  SARM1 targeting guide sequence portion
gcggccucgaccugcuguugc

SEQ ID NO: 2302 - RNA, 21 nt, Artificial Sequence
  SARM1 targeting guide sequence portion
gcggccugcacacgcgucucc

SEQ ID NO: 2303 - RNA, 21 nt, Artificial Sequence
  SARM1 targeting guide sequence portion
gcggcugcugcaggcgccgga

SEQ ID NO: 2304 - RNA, 21 nt, Artificial Sequence
  SARM1 targeting guide sequence portion
gcggcuggcggugccugggcc

SEQ ID NO: 2305 - RNA, 21 nt, Artificial Sequence
  SARM1 targeting guide sequence portion
gcggugccugggccagauggg

SEQ ID NO: 2306 - RNA, 21 nt, Artificial Sequence
  SARM1 targeting guide sequence portion
gcguccugcaccucggugccu

SEQ ID NO: 2307 - RNA, 21 nt, Artificial Sequence
  SARM1 targeting guide sequence portion
gcgucgcacagacccugggcu

SEQ ID NO: 2308 - RNA, 21 nt, Artificial Sequence
  SARM1 targeting guide sequence portion
gcgucuccaacuccggcgccu

SEQ ID NO: 2309 - RNA, 21 nt, Artificial Sequence
  SARM1 targeting guide sequence portion
gcgugugcaggccgcgcgccu

SEQ ID NO: 2310 - RNA, 21 nt, Artificial Sequence
  SARM1 targeting guide sequence portion
gcucaccgguucucagccacc

SEQ ID NO: 2311 - RNA, 21 nt, Artificial Sequence
  SARM1 targeting guide sequence portion
gcuccagcaggcgcgcggccu

SEQ ID NO: 2312 - RNA, 21 nt, Artificial Sequence
  SARM1 targeting guide sequence portion
gcuccagggcguccugcaccu

SEQ ID NO: 2313 - RNA, 21 nt, Artificial Sequence
  SARM1 targeting guide sequence portion
gcuccggcagcgcgcgcucca

SEQ ID NO: 2314 - RNA, 21 nt, Artificial Sequence
  SARM1 targeting guide sequence portion
gcugcagcaggccuuguccgc

SEQ ID NO: 2315 - RNA, 21 nt, Artificial Sequence
  SARM1 targeting guide sequence portion
gcugcagcuccggcagcgcgc

SEQ ID NO: 2316 - RNA, 21 nt, Artificial Sequence
  SARM1 targeting guide sequence portion
gcugcaggcgccggaguugga

SEQ ID NO: 2317 - RNA, 21 nt, Artificial Sequence
  SARM1 targeting guide sequence portion
gcugccggagcugcagcaggc

SEQ ID NO: 2318 - RNA, 21 nt, Artificial Sequence
  SARM1 targeting guide sequence portion
gcugccggccgugggccgcga

SEQ ID NO: 2319 - RNA, 21 nt, Artificial Sequence
  SARM1 targeting guide sequence portion
gcugcugcaggcgccggaguu

SEQ ID NO: 2320 - RNA, 21 nt, Artificial Sequence
  SARM1 targeting guide sequence portion
gcugcugccggccgugggccg

SEQ ID NO: 2321 - RNA, 21 nt, Artificial Sequence
  SARM1 targeting guide sequence portion
gcugcuucucuccgccuacaa

SEQ ID NO: 2322 - RNA, 21 nt, Artificial Sequence
  SARM1 targeting guide sequence portion
gcuggagcagauccugguggc

SEQ ID NO: 2323 - RNA, 21 nt, Artificial Sequence
  SARM1 targeting guide sequence portion
gcuggcggugccugggccaga

SEQ ID NO: 2324 - RNA, 21 nt, Artificial Sequence
  SARM1 targeting guide sequence portion
gcugugucgcuucuucgccau

SEQ ID NO: 2325 - RNA, 21 nt, Artificial Sequence
  SARM1 targeting guide sequence portion
gcuguugcggcugcugcaggc

SEQ ID NO: 2326 - RNA, 21 nt, Artificial Sequence
  SARM1 targeting guide sequence portion
gcuucagcgcggacaaggccu

SEQ ID NO: 2327 - RNA, 21 nt, Artificial Sequence
  SARM1 targeting guide sequence portion
gcuucucuccgccuacaagcu

SEQ ID NO: 2328 - RNA, 21 nt, Artificial Sequence
  SARM1 targeting guide sequence portion
gcuucuucgccaugucgggcc

SEQ ID NO: 2329 - RNA, 21 nt, Artificial Sequence
  SARM1 targeting guide sequence portion
gcuuguaggcggagagaagca

SEQ ID NO: 2330 - RNA, 21 nt, Artificial Sequence
  SARM1 targeting guide sequence portion
ggaagaccucggccaggccgg

SEQ ID NO: 2331 - RNA, 21 nt, Artificial Sequence
  SARM1 targeting guide sequence portion
ggacaaggccugcugcagcuc

SEQ ID NO: 2332 - RNA, 21 nt, Artificial Sequence
  SARM1 targeting guide sequence portion
ggacgcccuggagcgcgcgcu

SEQ ID NO: 2333 - RNA, 21 nt, Artificial Sequence
  SARM1 targeting guide sequence portion
ggagacgcgugugcaggccgc

SEQ ID NO: 2334 - RNA, 21 nt, Artificial Sequence
  SARM1 targeting guide sequence portion
ggagcagauccugguggcuga

SEQ ID NO: 2335 - RNA, 21 nt, Artificial Sequence
  SARM1 targeting guide sequence portion
ggagcgcgcgcugccggagcu

SEQ ID NO: 2336 - RNA, 21 nt, Artificial Sequence
  SARM1 targeting guide sequence portion
ggagcugcagcaggccuuguc

SEQ ID NO: 2337 - RNA, 21 nt, Artificial Sequence
  SARM1 targeting guide sequence portion
ggaguuggagacgcgugugca

SEQ ID NO: 2338 - RNA, 21 nt, Artificial Sequence
  SARM1 targeting guide sequence portion
ggaucugcuccagcaggcgcg

SEQ ID NO: 2339 - RNA, 21 nt, Artificial Sequence
  SARM1 targeting guide sequence portion
ggauggcgucgcacagacccu

SEQ ID NO: 2340 - RNA, 21 nt, Artificial Sequence
  SARM1 targeting guide sequence portion
ggcaccgaggugcaggacgcc

SEQ ID NO: 2341 - RNA, 21 nt, Artificial Sequence
  SARM1 targeting guide sequence portion
ggcagcgcgcgcuccagggcg

SEQ ID NO: 2342 - RNA, 21 nt, Artificial Sequence
  SARM1 targeting guide sequence portion
ggcaggcaccgaggugcagga

SEQ ID NO: 2343 - RNA, 21 nt, Artificial Sequence
  SARM1 targeting guide sequence portion
ggccagaugggggcgguggca

SEQ ID NO: 2344 - RNA, 21 nt, Artificial Sequence
  SARM1 targeting guide sequence portion
ggcccacggccggcagcagcc

SEQ ID NO: 2345 - RNA, 21 nt, Artificial Sequence
  SARM1 targeting guide sequence portion
ggccccgcgaagugucgccgg

SEQ ID NO: 2346 - RNA, 21 nt, Artificial Sequence
  SARM1 targeting guide sequence portion
ggcccgacauggcgaagaagc

SEQ ID NO: 2347 - RNA, 21 nt, Artificial Sequence
  SARM1 targeting guide sequence portion
ggcccgcggccacccgcagcc

SEQ ID NO: 2348 - RNA, 21 nt, Artificial Sequence
  SARM1 targeting guide sequence portion
ggcccgugccaccgcccccau

SEQ ID NO: 2349 - RNA, 21 nt, Artificial Sequence
  SARM1 targeting guide sequence portion
ggccgaggucuuccaacuggu

SEQ ID NO: 2350 - RNA, 21 nt, Artificial Sequence
  SARM1 targeting guide sequence portion
ggccgccaucgaggcggaugg

SEQ ID NO: 2351 - RNA, 21 nt, Artificial Sequence
  SARM1 targeting guide sequence portion
ggccgcgagguagcccagggu

SEQ ID NO: 2352 - RNA, 21 nt, Artificial Sequence
  SARM1 targeting guide sequence portion
ggccgcgcgccugcuggagca

SEQ ID NO: 2353 - RNA, 21 nt, Artificial Sequence
  SARM1 targeting guide sequence portion
ggccgugggcccgacauggcg

SEQ ID NO: 2354 - RNA, 21 nt, Artificial Sequence
  SARM1 targeting guide sequence portion
ggccgugggccgcgagguagc

SEQ ID NO: 2355 - RNA, 21 nt, Artificial Sequence
  SARM1 targeting guide sequence portion
ggccuccuccaccaguuggaa

SEQ ID NO: 2356 - RNA, 21 nt, Artificial Sequence
  SARM1 targeting guide sequence portion
ggccucgaccugcuguugcgg

SEQ ID NO: 2357 - RNA, 21 nt, Artificial Sequence
  SARM1 targeting guide sequence portion
ggccugcacacgcgucuccaa

SEQ ID NO: 2358 - RNA, 21 nt, Artificial Sequence
  SARM1 targeting guide sequence portion
ggccugcugcagcuccggcag

SEQ ID NO: 2359 - RNA, 21 nt, Artificial Sequence
  SARM1 targeting guide sequence portion
ggccuggccgaggucuuccaa

SEQ ID NO: 2360 - RNA, 21 nt, Artificial Sequence
  SARM1 targeting guide sequence portion
ggccuuguccgcgcugaagca

SEQ ID NO: 2361 - RNA, 21 nt, Artificial Sequence
  SARM1 targeting guide sequence portion
ggcgaagaagcgacacagcuu

SEQ ID NO: 2362 - RNA, 21 nt, Artificial Sequence
  SARM1 targeting guide sequence portion
ggcgacacuucgcggggcccg

SEQ ID NO: 2363 - RNA, 21 nt, Artificial Sequence
  SARM1 targeting guide sequence portion
ggcgccggaguuggagacgcg

SEQ ID NO: 2364 - RNA, 21 nt, Artificial Sequence
  SARM1 targeting guide sequence portion
ggcgccggccuggccgagguc

SEQ ID NO: 2365 - RNA, 21 nt, Artificial Sequence
  SARM1 targeting guide sequence portion
ggcgccugcagcagccgcaac

SEQ ID NO: 2366 - RNA, 21 nt, Artificial Sequence
  SARM1 targeting guide sequence portion
ggcgcgcggccugcacacgcg

SEQ ID NO: 2367 - RNA, 21 nt, Artificial Sequence
  SARM1 targeting guide sequence portion
ggcggagagaagcagcgucag

SEQ ID NO: 2368 - RNA, 21 nt, Artificial Sequence
  SARM1 targeting guide sequence portion
ggcggauggcgucgcacagac

SEQ ID NO: 2369 - RNA, 21 nt, Artificial Sequence
  SARM1 targeting guide sequence portion
ggcggccucgaccugcuguug

SEQ ID NO: 2370 - RNA, 21 nt, Artificial Sequence
  SARM1 targeting guide sequence portion
ggcggugccugggccagaugg

SEQ ID NO: 2371 - RNA, 21 nt, Artificial Sequence
  SARM1 targeting guide sequence portion
ggcgguggcacgggcccaugg

SEQ ID NO: 2372 - RNA, 21 nt, Artificial Sequence
  SARM1 targeting guide sequence portion
ggcguccugcaccucggugcc

SEQ ID NO: 2373 - RNA, 21 nt, Artificial Sequence
  SARM1 targeting guide sequence portion
ggcgucgcacagacccugggc

SEQ ID NO: 2374 - RNA, 21 nt, Artificial Sequence
  SARM1 targeting guide sequence portion
ggcugcugcaggcgccggagu

SEQ ID NO: 2375 - RNA, 21 nt, Artificial Sequence
  SARM1 targeting guide sequence portion
ggcuggcggugccugggccag

SEQ ID NO: 2376 - RNA, 21 nt, Artificial Sequence
  SARM1 targeting guide sequence portion
gggcaggcaccgaggugcagg

SEQ ID NO: 2377 - RNA, 21 nt, Artificial Sequence
  SARM1 targeting guide sequence portion
gggccagaugggggcgguggc

SEQ ID NO: 2378 - RNA, 21 nt, Artificial Sequence
  SARM1 targeting guide sequence portion
gggccccgcgaagugucgccg

SEQ ID NO: 2379 - RNA, 21 nt, Artificial Sequence
  SARM1 targeting guide sequence portion
gggcccgacauggcgaagaag

SEQ ID NO: 2380 - RNA, 21 nt, Artificial Sequence
  SARM1 targeting guide sequence portion
gggcccgugccaccgccccca

SEQ ID NO: 2381 - RNA, 21 nt, Artificial Sequence
  SARM1 targeting guide sequence portion
gggccgcgagguagcccaggg

SEQ ID NO: 2382 - RNA, 21 nt, Artificial Sequence
  SARM1 targeting guide sequence portion
gggcgccggccuggccgaggu

SEQ ID NO: 2383 - RNA, 21 nt, Artificial Sequence
  SARM1 targeting guide sequence portion
gggcgguggcacgggcccaug

SEQ ID NO: 2384 - RNA, 21 nt, Artificial Sequence
  SARM1 targeting guide sequence portion
gggcguccugcaccucggugc

SEQ ID NO: 2385 - RNA, 21 nt, Artificial Sequence
  SARM1 targeting guide sequence portion
ggggcaggcaccgaggugcag

SEQ ID NO: 2386 - RNA, 21 nt, Artificial Sequence
  SARM1 targeting guide sequence portion
ggggcgguggcacgggcccau

SEQ ID NO: 2387 - RNA, 21 nt, Artificial Sequence
  SARM1 targeting guide sequence portion
gggggcaggcaccgaggugca

SEQ ID NO: 2388 - RNA, 21 nt, Artificial Sequence
  SARM1 targeting guide sequence portion
gggggcgguggcacgggccca

SEQ ID NO: 2389 - RNA, 21 nt, Artificial Sequence
  SARM1 targeting guide sequence portion
gggucugugcgacgccauccg

SEQ ID NO: 2390 - RNA, 21 nt, Artificial Sequence
  SARM1 targeting guide sequence portion
ggguggccgcgggccccgcga

SEQ ID NO: 2391 - RNA, 21 nt, Artificial Sequence
  SARM1 targeting guide sequence portion
gguagcccagggucugugcga

SEQ ID NO: 2392 - RNA, 21 nt, Artificial Sequence
  SARM1 targeting guide sequence portion
gguccugacgcugcuucucuc

SEQ ID NO: 2393 - RNA, 21 nt, Artificial Sequence
  SARM1 targeting guide sequence portion
ggucgaggccgccaucgaggc

SEQ ID NO: 2394 - RNA, 21 nt, Artificial Sequence
  SARM1 targeting guide sequence portion
ggucugugcgacgccauccgc

SEQ ID NO: 2395 - RNA, 21 nt, Artificial Sequence
  SARM1 targeting guide sequence portion
ggucuuccaacugguggagga

SEQ ID NO: 2396 - RNA, 21 nt, Artificial Sequence
  SARM1 targeting guide sequence portion
ggugcaggacgcccuggagcg

SEQ ID NO: 2397 - RNA, 21 nt, Artificial Sequence
  SARM1 targeting guide sequence portion
ggugccugcccccggcgacac

SEQ ID NO: 2398 - RNA, 21 nt, Artificial Sequence
  SARM1 targeting guide sequence portion
ggugccugggccagauggggg

SEQ ID NO: 2399 - RNA, 21 nt, Artificial Sequence
  SARM1 targeting guide sequence portion
gguggccgcgggccccgcgaa

SEQ ID NO: 2400 - RNA, 21 nt, Artificial Sequence
  SARM1 targeting guide sequence portion
gguucucagccaccaggaucu

SEQ ID NO: 2401 - RNA, 21 nt, Artificial Sequence
  SARM1 targeting guide sequence portion
guagcccagggucugugcgac

SEQ ID NO: 2402 - RNA, 21 nt, Artificial Sequence
  SARM1 targeting guide sequence portion
guaggcggagagaagcagcgu

SEQ ID NO: 2403 - RNA, 21 nt, Artificial Sequence
  SARM1 targeting guide sequence portion
guccgcgcugaagcaggcggg

SEQ ID NO: 2404 - RNA, 21 nt, Artificial Sequence
  SARM1 targeting guide sequence portion
guccugacgcugcuucucucc

SEQ ID NO: 2405 - RNA, 21 nt, Artificial Sequence
  SARM1 targeting guide sequence portion
guccugcaccucggugccugc

SEQ ID NO: 2406 - RNA, 21 nt, Artificial Sequence
  SARM1 targeting guide sequence portion
gucgaggccgccaucgaggcg

SEQ ID NO: 2407 - RNA, 21 nt, Artificial Sequence
  SARM1 targeting guide sequence portion
gucgcacagacccugggcuac

SEQ ID NO: 2408 - RNA, 21 nt, Artificial Sequence
  SARM1 targeting guide sequence portion
gucgccgggggcaggcaccga

SEQ ID NO: 2409 - RNA, 21 nt, Artificial Sequence
  SARM1 targeting guide sequence portion
gucgcuucuucgccaugucgg

SEQ ID NO: 2410 - RNA, 21 nt, Artificial Sequence
  SARM1 targeting guide sequence portion
gucuccaacuccggcgccugc

SEQ ID NO: 2411 - RNA, 21 nt, Artificial Sequence
  SARM1 targeting guide sequence portion
gucugugcgacgccauccgcc

SEQ ID NO: 2412 - RNA, 21 nt, Artificial Sequence
  SARM1 targeting guide sequence portion
gucuuccaacugguggaggag

SEQ ID NO: 2413 - RNA, 21 nt, Artificial Sequence
  SARM1 targeting guide sequence portion
gugcaggacgcccuggagcgc

SEQ ID NO: 2414 - RNA, 21 nt, Artificial Sequence
  SARM1 targeting guide sequence portion
gugcaggccgcgcgccugcug

SEQ ID NO: 2415 - RNA, 21 nt, Artificial Sequence
  SARM1 targeting guide sequence portion
gugccaccgcccccaucuggc

SEQ ID NO: 2416 - RNA, 21 nt, Artificial Sequence
  SARM1 targeting guide sequence portion
gugccugcccccggcgacacu

SEQ ID NO: 2417 - RNA, 21 nt, Artificial Sequence
  SARM1 targeting guide sequence portion
gugccugggccagaugggggc

SEQ ID NO: 2418 - RNA, 21 nt, Artificial Sequence
  SARM1 targeting guide sequence portion
gugcgacgccauccgccucga

SEQ ID NO: 2419 - RNA, 21 nt, Artificial Sequence
  SARM1 targeting guide sequence portion
guggccgcgggccccgcgaag

SEQ ID NO: 2420 - RNA, 21 nt, Artificial Sequence
  SARM1 targeting guide sequence portion
gugggcccgacauggcgaaga

SEQ ID NO: 2421 - RNA, 21 nt, Artificial Sequence
  SARM1 targeting guide sequence portion
gugggccgcgagguagcccag

SEQ ID NO: 2422 - RNA, 21 nt, Artificial Sequence
  SARM1 targeting guide sequence portion
gugggcgccggccuggccgag

SEQ ID NO: 2423 - RNA, 21 nt, Artificial Sequence
  SARM1 targeting guide sequence portion
gugucgccgggggcaggcacc

SEQ ID NO: 2424 - RNA, 21 nt, Artificial Sequence
  SARM1 targeting guide sequence portion
gugucgcuucuucgccauguc

SEQ ID NO: 2425 - RNA, 21 nt, Artificial Sequence
  SARM1 targeting guide sequence portion
gugugcaggccgcgcgccugc

SEQ ID NO: 2426 - RNA, 21 nt, Artificial Sequence
  SARM1 targeting guide sequence portion
guucucagccaccaggaucug

SEQ ID NO: 2427 - RNA, 21 nt, Artificial Sequence
  SARM1 targeting guide sequence portion
guugcggcugcugcaggcgcc

SEQ ID NO: 2428 - RNA, 21 nt, Artificial Sequence
  SARM1 targeting guide sequence portion
guuggaagaccucggccaggc

SEQ ID NO: 2429 - RNA, 21 nt, Artificial Sequence
  SARM1 targeting guide sequence portion
guuggagacgcgugugcaggc

SEQ ID NO: 2430 - RNA, 21 nt, Artificial Sequence
  SARM1 targeting guide sequence portion
uacaagcugugucgcuucuuc

SEQ ID NO: 2431 - RNA, 21 nt, Artificial Sequence
  SARM1 targeting guide sequence portion
uagcccagggucugugcgacg

SEQ ID NO: 2432 - RNA, 21 nt, Artificial Sequence
  SARM1 targeting guide sequence portion
uaggcggagagaagcagcguc

SEQ ID NO: 2433 - RNA, 21 nt, Artificial Sequence
  SARM1 targeting guide sequence portion
ucaccgguucucagccaccag

SEQ ID NO: 2434 - RNA, 21 nt, Artificial Sequence
  SARM1 targeting guide sequence portion
ucagccaccaggaucugcucc

SEQ ID NO: 2435 - RNA, 21 nt, Artificial Sequence
  SARM1 targeting guide sequence portion
ucagcgcggacaaggccugcu

SEQ ID NO: 2436 - RNA, 21 nt, Artificial Sequence
  SARM1 targeting guide sequence portion
uccaacuccggcgccugcagc

SEQ ID NO: 2437 - RNA, 21 nt, Artificial Sequence
  SARM1 targeting guide sequence portion
uccaacugguggaggaggccu

SEQ ID NO: 2438 - RNA, 21 nt, Artificial Sequence
  SARM1 targeting guide sequence portion
uccaccaguuggaagaccucg

SEQ ID NO: 2439 - RNA, 21 nt, Artificial Sequence
  SARM1 targeting guide sequence portion
uccagcaggcgcgcggccugc

SEQ ID NO: 2440 - RNA, 21 nt, Artificial Sequence
  SARM1 targeting guide sequence portion
uccagggcguccugcaccucg

SEQ ID NO: 2441 - RNA, 21 nt, Artificial Sequence
  SARM1 targeting guide sequence portion
uccgccuacaagcugugucgc

SEQ ID NO: 2442 - RNA, 21 nt, Artificial Sequence
  SARM1 targeting guide sequence portion
uccgccucgauggcggccucg

SEQ ID NO: 2443 - RNA, 21 nt, Artificial Sequence
  SARM1 targeting guide sequence portion
uccgcgcugaagcaggcgggc

SEQ ID NO: 2444 - RNA, 21 nt, Artificial Sequence
  SARM1 targeting guide sequence portion
uccggcagcgcgcgcuccagg

SEQ ID NO: 2445 - RNA, 21 nt, Artificial Sequence
  SARM1 targeting guide sequence portion
uccggcgccugcagcagccgc

SEQ ID NO: 2446 - RNA, 21 nt, Artificial Sequence
  SARM1 targeting guide sequence portion
uccuccaccaguuggaagacc

SEQ ID NO: 2447 - RNA, 21 nt, Artificial Sequence
  SARM1 targeting guide sequence portion
uccugacgcugcuucucuccg

SEQ ID NO: 2448 - RNA, 21 nt, Artificial Sequence
  SARM1 targeting guide sequence portion
uccugcaccucggugccugcc

SEQ ID NO: 2449 - RNA, 21 nt, Artificial Sequence
  SARM1 targeting guide sequence portion
ucgaccugcuguugcggcugc

SEQ ID NO: 2450 - RNA, 21 nt, Artificial Sequence
  SARM1 targeting guide sequence portion
ucgaggccgccaucgaggcgg

SEQ ID NO: 2451 - RNA, 21 nt, Artificial Sequence
  SARM1 targeting guide sequence portion
ucgaggcggauggcgucgcac

SEQ ID NO: 2452 - RNA, 21 nt, Artificial Sequence
  SARM1 targeting guide sequence portion
ucgauggcggccucgaccugc

SEQ ID NO: 2453 - RNA, 21 nt, Artificial Sequence
  SARM1 targeting guide sequence portion
ucgcacagacccugggcuacc

SEQ ID NO: 2454 - RNA, 21 nt, Artificial Sequence
  SARM1 targeting guide sequence portion
ucgccaugucgggcccacggc

SEQ ID NO: 2455 - RNA, 21 nt, Artificial Sequence
  SARM1 targeting guide sequence portion
ucgccgggggcaggcaccgag

SEQ ID NO: 2456 - RNA, 21 nt, Artificial Sequence
  SARM1 targeting guide sequence portion
ucgcggcccacggccggcagc

SEQ ID NO: 2457 - RNA, 21 nt, Artificial Sequence
  SARM1 targeting guide sequence portion
ucgcuucuucgccaugucggg

SEQ ID NO: 2458 - RNA, 21 nt, Artificial Sequence
  SARM1 targeting guide sequence portion
ucggcgcccggccgugggccc

SEQ ID NO: 2459 - RNA, 21 nt, Artificial Sequence
  SARM1 targeting guide sequence portion
ucggugccugcccccggcgac

SEQ ID NO: 2460 - RNA, 21 nt, Artificial Sequence
  SARM1 targeting guide sequence portion
ucucagccaccaggaucugcu

SEQ ID NO: 2461 - RNA, 21 nt, Artificial Sequence
  SARM1 targeting guide sequence portion
ucuccaacuccggcgccugca

SEQ ID NO: 2462 - RNA, 21 nt, Artificial Sequence
  SARM1 targeting guide sequence portion
ucuccgccuacaagcuguguc

SEQ ID NO: 2463 - RNA, 21 nt, Artificial Sequence
  SARM1 targeting guide sequence portion
ucucuccgccuacaagcugug

SEQ ID NO: 2464 - RNA, 21 nt, Artificial Sequence
  SARM1 targeting guide sequence portion
ucugcuccagcaggcgcgcgg

SEQ ID NO: 2465 - RNA, 21 nt, Artificial Sequence
  SARM1 targeting guide sequence portion
ucuggcccaggcaccgccagc

SEQ ID NO: 2466 - RNA, 21 nt, Artificial Sequence
  SARM1 targeting guide sequence portion
ucugugcgacgccauccgccu

SEQ ID NO: 2467 - RNA, 21 nt, Artificial Sequence
  SARM1 targeting guide sequence portion
ucuuccaacugguggaggagg

SEQ ID NO: 2468 - RNA, 21 nt, Artificial Sequence
  SARM1 targeting guide sequence portion
ucuucgccaugucgggcccac

SEQ ID NO: 2469 - RNA, 21 nt, Artificial Sequence
  SARM1 targeting guide sequence portion
ugacgcugcuucucuccgccu

SEQ ID NO: 2470 - RNA, 21 nt, Artificial Sequence
  SARM1 targeting guide sequence portion
ugcacacgcgucuccaacucc

SEQ ID NO: 2471 - RNA, 21 nt, Artificial Sequence
  SARM1 targeting guide sequence portion
ugcaccucggugccugccccc

SEQ ID NO: 2472 - RNA, 21 nt, Artificial Sequence
  SARM1 targeting guide sequence portion
ugcagcagccgcaacagcagg

SEQ ID NO: 2473 - RNA, 21 nt, Artificial Sequence
  SARM1 targeting guide sequence portion
ugcagcaggccuuguccgcgc

SEQ ID NO: 2474 - RNA, 21 nt, Artificial Sequence
  SARM1 targeting guide sequence portion
ugcagcuccggcagcgcgcgc

SEQ ID NO: 2475 - RNA, 21 nt, Artificial Sequence
  SARM1 targeting guide sequence portion
ugcaggacgcccuggagcgcg

SEQ ID NO: 2476 - RNA, 21 nt, Artificial Sequence
  SARM1 targeting guide sequence portion
ugcaggccgcgcgccugcugg

SEQ ID NO: 2477 - RNA, 21 nt, Artificial Sequence
  SARM1 targeting guide sequence portion
ugcaggcgccggaguuggaga

SEQ ID NO: 2478 - RNA, 21 nt, Artificial Sequence
  SARM1 targeting guide sequence portion
ugccaccgcccccaucuggcc

SEQ ID NO: 2479 - RNA, 21 nt, Artificial Sequence
  SARM1 targeting guide sequence portion
ugcccccggcgacacuucgcg

SEQ ID NO: 2480 - RNA, 21 nt, Artificial Sequence
  SARM1 targeting guide sequence portion
ugccggagcugcagcaggccu

SEQ ID NO: 2481 - RNA, 21 nt, Artificial Sequence
  SARM1 targeting guide sequence portion
ugccggccgugggccgcgagg

SEQ ID NO: 2482 - RNA, 21 nt, Artificial Sequence
  SARM1 targeting guide sequence portion
ugccugcccccggcgacacuu

SEQ ID NO: 2483 - RNA, 21 nt, Artificial Sequence
  SARM1 targeting guide sequence portion
ugccugggccagaugggggcg

SEQ ID NO: 2484 - RNA, 21 nt, Artificial Sequence
  SARM1 targeting guide sequence portion
ugcgacgccauccgccucgau

SEQ ID NO: 2485 - RNA, 21 nt, Artificial Sequence
  SARM1 targeting guide sequence portion
ugcggcugcugcaggcgccgg

SEQ ID NO: 2486 - RNA, 21 nt, Artificial Sequence
  SARM1 targeting guide sequence portion
ugcggguggccgcgggccccg

SEQ ID NO: 2487 - RNA, 21 nt, Artificial Sequence
  SARM1 targeting guide sequence portion
ugcuccagcaggcgcgcggcc

SEQ ID NO: 2488 - RNA, 21 nt, Artificial Sequence
  SARM1 targeting guide sequence portion
ugcugcagcuccggcagcgcg

SEQ ID NO: 2489 - RNA, 21 nt, Artificial Sequence
  SARM1 targeting guide sequence portion
ugcugcaggcgccggaguugg

SEQ ID NO: 2490 - RNA, 21 nt, Artificial Sequence
  SARM1 targeting guide sequence portion
ugcugccggccgugggccgcg

SEQ ID NO: 2491 - RNA, 21 nt, Artificial Sequence
  SARM1 targeting guide sequence portion
ugcuggagcagauccuggugg

SEQ ID NO: 2492 - RNA, 21 nt, Artificial Sequence
  SARM1 targeting guide sequence portion
ugcuguugcggcugcugcagg

SEQ ID NO: 2493 - RNA, 21 nt, Artificial Sequence
  SARM1 targeting guide sequence portion
ugcuucagcgcggacaaggcc

SEQ ID NO: 2494 - RNA, 21 nt, Artificial Sequence
  SARM1 targeting guide sequence portion
ugcuucucuccgccuacaagc

SEQ ID NO: 2495 - RNA, 21 nt, Artificial Sequence
  SARM1 targeting guide sequence portion
uggaagaccucggccaggccg

SEQ ID NO: 2496 - RNA, 21 nt, Artificial Sequence
  SARM1 targeting guide sequence portion
uggagacgcgugugcaggccg

SEQ ID NO: 2497 - RNA, 21 nt, Artificial Sequence
  SARM1 targeting guide sequence portion
uggagcagauccugguggcug

SEQ ID NO: 2498 - RNA, 21 nt, Artificial Sequence
  SARM1 targeting guide sequence portion
uggagcgcgcgcugccggagc

SEQ ID NO: 2499 - RNA, 21 nt, Artificial Sequence
  SARM1 targeting guide sequence portion
uggcccaggcaccgccagccg

SEQ ID NO: 2500 - RNA, 21 nt, Artificial Sequence
  SARM1 targeting guide sequence portion
uggccgaggucuuccaacugg

SEQ ID NO: 2501 - RNA, 21 nt, Artificial Sequence
  SARM1 targeting guide sequence portion
uggccgcgggccccgcgaagu

SEQ ID NO: 2502 - RNA, 21 nt, Artificial Sequence
  SARM1 targeting guide sequence portion
uggcgaagaagcgacacagcu

SEQ ID NO: 2503 - RNA, 21 nt, Artificial Sequence
  SARM1 targeting guide sequence portion
uggcggccucgaccugcuguu

SEQ ID NO: 2504 - RNA, 21 nt, Artificial Sequence
  SARM1 targeting guide sequence portion
uggcggugccugggccagaug

SEQ ID NO: 2505 - RNA, 21 nt, Artificial Sequence
  SARM1 targeting guide sequence portion
uggcgucgcacagacccuggg

SEQ ID NO: 2506 - RNA, 21 nt, Artificial Sequence
  SARM1 targeting guide sequence portion
ugggccagaugggggcggugg

SEQ ID NO: 2507 - RNA, 21 nt, Artificial Sequence
  SARM1 targeting guide sequence portion
ugggcccgacauggcgaagaa

SEQ ID NO: 2508 - RNA, 21 nt, Artificial Sequence
  SARM1 targeting guide sequence portion
ugggcccgugccaccgccccc

SEQ ID NO: 2509 - RNA, 21 nt, Artificial Sequence
  SARM1 targeting guide sequence portion
ugggccgcgagguagcccagg

SEQ ID NO: 2510 - RNA, 21 nt, Artificial Sequence
  SARM1 targeting guide sequence portion
ugggcgccggccuggccgagg

SEQ ID NO: 2511 - RNA, 21 nt, Artificial Sequence
  SARM1 targeting guide sequence portion
ugggggcgguggcacgggccc

SEQ ID NO: 2512 - RNA, 21 nt, Artificial Sequence
  SARM1 targeting guide sequence portion
ugguccugacgcugcuucucu

SEQ ID NO: 2513 - RNA, 21 nt, Artificial Sequence
  SARM1 targeting guide sequence portion
uguaggcggagagaagcagcg

SEQ ID NO: 2514 - RNA, 21 nt, Artificial Sequence
  SARM1 targeting guide sequence portion
uguccgcgcugaagcaggcgg

SEQ ID NO: 2515 - RNA, 21 nt, Artificial Sequence
  SARM1 targeting guide sequence portion
ugucgccgggggcaggcaccg

SEQ ID NO: 2516 - RNA, 21 nt, Artificial Sequence
  SARM1 targeting guide sequence portion
ugucgcuucuucgccaugucg

SEQ ID NO: 2517 - RNA, 21 nt, Artificial Sequence
  SARM1 targeting guide sequence portion
ugugcaggccgcgcgccugcu

SEQ ID NO: 2518 - RNA, 21 nt, Artificial Sequence
  SARM1 targeting guide sequence portion
ugugcgacgccauccgccucg

SEQ ID NO: 2519 - RNA, 21 nt, Artificial Sequence
  SARM1 targeting guide sequence portion
ugugucgcuucuucgccaugu

SEQ ID NO: 2520 - RNA, 21 nt, Artificial Sequence
  SARM1 targeting guide sequence portion
uguugcggcugcugcaggcgc

SEQ ID NO: 2521 - RNA, 21 nt, Artificial Sequence
  SARM1 targeting guide sequence portion
uucagcgcggacaaggccugc

SEQ ID NO: 2522 - RNA, 21 nt, Artificial Sequence
  SARM1 targeting guide sequence portion
uuccaacugguggaggaggcc

SEQ ID NO: 2523 - RNA, 21 nt, Artificial Sequence
  SARM1 targeting guide sequence portion
uucgccaugucgggcccacgg

SEQ ID NO: 2524 - RNA, 21 nt, Artificial Sequence
  SARM1 targeting guide sequence portion
uucucagccaccaggaucugc

SEQ ID NO: 2525 - RNA, 21 nt, Artificial Sequence
  SARM1 targeting guide sequence portion
uucucuccgccuacaagcugu

SEQ ID NO: 2526 - RNA, 21 nt, Artificial Sequence
  SARM1 targeting guide sequence portion
uucuucgccaugucgggccca

SEQ ID NO: 2527 - RNA, 21 nt, Artificial Sequence
  SARM1 targeting guide sequence portion
uugcggcugcugcaggcgccg

SEQ ID NO: 2528 - RNA, 21 nt, Artificial Sequence
  SARM1 targeting guide sequence portion
uuggaagaccucggccaggcc

SEQ ID NO: 2529 - RNA, 21 nt, Artificial Sequence
  SARM1 targeting guide sequence portion
uuggagacgcgugugcaggcc

SEQ ID NO: 2530 - RNA, 21 nt, Artificial Sequence
  SARM1 targeting guide sequence portion
uuguaggcggagagaagcagc

SEQ ID NO: 2531 - RNA, 21 nt, Artificial Sequence
  SARM1 targeting guide sequence portion
uuguccgcgcugaagcaggcg

SEQ ID NO: 2532 - RNA, 22 nt, Artificial Sequence
  SARM1 targeting guide sequence portion
aacagcaggucgaggccgccau

SEQ ID NO: 2533 - RNA, 22 nt, Artificial Sequence
  SARM1 targeting guide sequence portion
aacuccggcgccugcagcagcc

SEQ ID NO: 2534 - RNA, 22 nt, Artificial Sequence
  SARM1 targeting guide sequence portion
aagaagcgacacagcuuguagg

SEQ ID NO: 2535 - RNA, 22 nt, Artificial Sequence
  SARM1 targeting guide sequence portion
aagaccucggccaggccggcgc

SEQ ID NO: 2536 - RNA, 22 nt, Artificial Sequence
  SARM1 targeting guide sequence portion
aagcgacacagcuuguaggcgg

SEQ ID NO: 2537 - RNA, 22 nt, Artificial Sequence
  SARM1 targeting guide sequence portion
aagcugugucgcuucuucgcca

SEQ ID NO: 2538 - RNA, 22 nt, Artificial Sequence
  SARM1 targeting guide sequence portion
aaggccugcugcagcuccggca

SEQ ID NO: 2539 - RNA, 22 nt, Artificial Sequence
  SARM1 targeting guide sequence portion
aagugucgccgggggcaggcac

SEQ ID NO: 2540 - RNA, 22 nt, Artificial Sequence
  SARM1 targeting guide sequence portion
acaagcugugucgcuucuucgc

SEQ ID NO: 2541 - RNA, 22 nt, Artificial Sequence
  SARM1 targeting guide sequence portion
acaaggccugcugcagcuccgg

SEQ ID NO: 2542 - RNA, 22 nt, Artificial Sequence
  SARM1 targeting guide sequence portion
acacagcuuguaggcggagaga

SEQ ID NO: 2543 - RNA, 22 nt, Artificial Sequence
  SARM1 targeting guide sequence portion
acacgcgucuccaacuccggcg

SEQ ID NO: 2544 - RNA, 22 nt, Artificial Sequence
  SARM1 targeting guide sequence portion
acagacccugggcuaccucgcg

SEQ ID NO: 2545 - RNA, 22 nt, Artificial Sequence
  SARM1 targeting guide sequence portion
acagcaggucgaggccgccauc

SEQ ID NO: 2546 - RNA, 22 nt, Artificial Sequence
  SARM1 targeting guide sequence portion
acagcuuguaggcggagagaag

SEQ ID NO: 2547 - RNA, 22 nt, Artificial Sequence
  SARM1 targeting guide sequence portion
acauggcgaagaagcgacacag

SEQ ID NO: 2548 - RNA, 22 nt, Artificial Sequence
  SARM1 targeting guide sequence portion
accaggaucugcuccagcaggc

SEQ ID NO: 2549 - RNA, 22 nt, Artificial Sequence
  SARM1 targeting guide sequence portion
accaguuggaagaccucggcca

SEQ ID NO: 2550 - RNA, 22 nt, Artificial Sequence
  SARM1 targeting guide sequence portion
accaugggcccgugccaccgcc

SEQ ID NO: 2551 - RNA, 22 nt, Artificial Sequence
  SARM1 targeting guide sequence portion
acccugggcuaccucgcggccc

SEQ ID NO: 2552 - RNA, 22 nt, Artificial Sequence
  SARM1 targeting guide sequence portion
accgaggugcaggacgcccugg

SEQ ID NO: 2553 - RNA, 22 nt, Artificial Sequence
  SARM1 targeting guide sequence portion
accgcccccaucuggcccaggc

SEQ ID NO: 2554 - RNA, 22 nt, Artificial Sequence
  SARM1 targeting guide sequence portion
accgguucucagccaccaggau

SEQ ID NO: 2555 - RNA, 22 nt, Artificial Sequence
  SARM1 targeting guide sequence portion
accucggugccugcccccggcg

SEQ ID NO: 2556 - RNA, 22 nt, Artificial Sequence
  SARM1 targeting guide sequence portion
accugcuguugcggcugcugca

SEQ ID NO: 2557 - RNA, 22 nt, Artificial Sequence
  SARM1 targeting guide sequence portion
acgccauccgccucgauggcgg

SEQ ID NO: 2558 - RNA, 22 nt, Artificial Sequence
  SARM1 targeting guide sequence portion
acgcccuggagcgcgcgcugcc

SEQ ID NO: 2559 - RNA, 22 nt, Artificial Sequence
  SARM1 targeting guide sequence portion
acgcgucuccaacuccggcgcc

SEQ ID NO: 2560 - RNA, 22 nt, Artificial Sequence
  SARM1 targeting guide sequence portion
acgcgugugcaggccgcgcgcc

SEQ ID NO: 2561 - RNA, 22 nt, Artificial Sequence
  SARM1 targeting guide sequence portion
acgcugcuucucuccgccuaca

SEQ ID NO: 2562 - RNA, 22 nt, Artificial Sequence
  SARM1 targeting guide sequence portion
acggcccgcgcgccgcccgccu

SEQ ID NO: 2563 - RNA, 22 nt, Artificial Sequence
  SARM1 targeting guide sequence portion
acuccggcgccugcagcagccg

SEQ ID NO: 2564 - RNA, 22 nt, Artificial Sequence
  SARM1 targeting guide sequence portion
agaagcgacacagcuuguaggc

SEQ ID NO: 2565 - RNA, 22 nt, Artificial Sequence
  SARM1 targeting guide sequence portion
agacccugggcuaccucgcggc

SEQ ID NO: 2566 - RNA, 22 nt, Artificial Sequence
  SARM1 targeting guide sequence portion
agaccucggccaggccggcgcc

SEQ ID NO: 2567 - RNA, 22 nt, Artificial Sequence
  SARM1 targeting guide sequence portion
agacgcgugugcaggccgcgcg

SEQ ID NO: 2568 - RNA, 22 nt, Artificial Sequence
  SARM1 targeting guide sequence portion
agauccugguggcugagaaccg

SEQ ID NO: 2569 - RNA, 22 nt, Artificial Sequence
  SARM1 targeting guide sequence portion
agaugggggcgguggcacgggc

SEQ ID NO: 2570 - RNA, 22 nt, Artificial Sequence
  SARM1 targeting guide sequence portion
agcagauccugguggcugagaa

SEQ ID NO: 2571 - RNA, 22 nt, Artificial Sequence
  SARM1 targeting guide sequence portion
agcagccaggccuccuccacca

SEQ ID NO: 2572 - RNA, 22 nt, Artificial Sequence
  SARM1 targeting guide sequence portion
agcagccgcaacagcaggucga

SEQ ID NO: 2573 - RNA, 22 nt, Artificial Sequence
  SARM1 targeting guide sequence portion
agcaggccuuguccgcgcugaa

SEQ ID NO: 2574 - RNA, 22 nt, Artificial Sequence
  SARM1 targeting guide sequence portion
agcaggcgcgcggccugcacac

SEQ ID NO: 2575 - RNA, 22 nt, Artificial Sequence
  SARM1 targeting guide sequence portion
agcaggucgaggccgccaucga

SEQ ID NO: 2576 - RNA, 22 nt, Artificial Sequence
  SARM1 targeting guide sequence portion
agccaccaggaucugcuccagc

SEQ ID NO: 2577 - RNA, 22 nt, Artificial Sequence
  SARM1 targeting guide sequence portion
agccaggccuccuccaccaguu

SEQ ID NO: 2578 - RNA, 22 nt, Artificial Sequence
  SARM1 targeting guide sequence portion
agcccaccaugggcccgugcca

SEQ ID NO: 2579 - RNA, 22 nt, Artificial Sequence
  SARM1 targeting guide sequence portion
agcccagggucugugcgacgcc

SEQ ID NO: 2580 - RNA, 22 nt, Artificial Sequence
  SARM1 targeting guide sequence portion
agccgcaacagcaggucgaggc

SEQ ID NO: 2581 - RNA, 22 nt, Artificial Sequence
  SARM1 targeting guide sequence portion
agcgacacagcuuguaggcgga

SEQ ID NO: 2582 - RNA, 22 nt, Artificial Sequence
  SARM1 targeting guide sequence portion
agcgcgcgcuccagggcguccu

SEQ ID NO: 2583 - RNA, 22 nt, Artificial Sequence
  SARM1 targeting guide sequence portion
agcgcgcgcugccggagcugca

SEQ ID NO: 2584 - RNA, 22 nt, Artificial Sequence
  SARM1 targeting guide sequence portion
agcgcggacaaggccugcugca

SEQ ID NO: 2585 - RNA, 22 nt, Artificial Sequence
  SARM1 targeting guide sequence portion
agcggcuggcggugccugggcc

SEQ ID NO: 2586 - RNA, 22 nt, Artificial Sequence
  SARM1 targeting guide sequence portion
agcuccggcagcgcgcgcucca

SEQ ID NO: 2587 - RNA, 22 nt, Artificial Sequence
  SARM1 targeting guide sequence portion
agcugcagcaggccuuguccgc

SEQ ID NO: 2588 - RNA, 22 nt, Artificial Sequence
  SARM1 targeting guide sequence portion
agcugugucgcuucuucgccau

SEQ ID NO: 2589 - RNA, 22 nt, Artificial Sequence
  SARM1 targeting guide sequence portion
agcuuguaggcggagagaagca

SEQ ID NO: 2590 - RNA, 22 nt, Artificial Sequence
  SARM1 targeting guide sequence portion
aggacgcccuggagcgcgcgcu

SEQ ID NO: 2591 - RNA, 22 nt, Artificial Sequence
  SARM1 targeting guide sequence portion
aggaucugcuccagcaggcgcg

SEQ ID NO: 2592 - RNA, 22 nt, Artificial Sequence
  SARM1 targeting guide sequence portion
aggcaccgaggugcaggacgcc

SEQ ID NO: 2593 - RNA, 22 nt, Artificial Sequence
  SARM1 targeting guide sequence portion
aggccgccaucgaggcggaugg

SEQ ID NO: 2594 - RNA, 22 nt, Artificial Sequence
  SARM1 targeting guide sequence portion
aggccgcgcgccugcuggagca

SEQ ID NO: 2595 - RNA, 22 nt, Artificial Sequence
  SARM1 targeting guide sequence portion
aggccuccuccaccaguuggaa

SEQ ID NO: 2596 - RNA, 22 nt, Artificial Sequence
  SARM1 targeting guide sequence portion
aggccugcugcagcuccggcag

SEQ ID NO: 2597 - RNA, 22 nt, Artificial Sequence
  SARM1 targeting guide sequence portion
aggccuuguccgcgcugaagca

SEQ ID NO: 2598 - RNA, 22 nt, Artificial Sequence
  SARM1 targeting guide sequence portion
aggcgccggaguuggagacgcg

SEQ ID NO: 2599 - RNA, 22 nt, Artificial Sequence
  SARM1 targeting guide sequence portion
aggcgcgcggccugcacacgcg

SEQ ID NO: 2600 - RNA, 22 nt, Artificial Sequence
  SARM1 targeting guide sequence portion
aggcggagagaagcagcgucag

SEQ ID NO: 2601 - RNA, 22 nt, Artificial Sequence
  SARM1 targeting guide sequence portion
aggcggauggcgucgcacagac

SEQ ID NO: 2602 - RNA, 22 nt, Artificial Sequence
  SARM1 targeting guide sequence portion
agggcguccugcaccucggugc

SEQ ID NO: 2603 - RNA, 22 nt, Artificial Sequence
  SARM1 targeting guide sequence portion
agggucugugcgacgccauccg

SEQ ID NO: 2604 - RNA, 22 nt, Artificial Sequence
  SARM1 targeting guide sequence portion
agguagcccagggucugugcga

SEQ ID NO: 2605 - RNA, 22 nt, Artificial Sequence
  SARM1 targeting guide sequence portion
aggucgaggccgccaucgaggc

SEQ ID NO: 2606 - RNA, 22 nt, Artificial Sequence
  SARM1 targeting guide sequence portion
aggucuuccaacugguggagga

SEQ ID NO: 2607 - RNA, 22 nt, Artificial Sequence
  SARM1 targeting guide sequence portion
aggugcaggacgcccuggagcg

SEQ ID NO: 2608 - RNA, 22 nt, Artificial Sequence
  SARM1 targeting guide sequence portion
agugucgccgggggcaggcacc

SEQ ID NO: 2609 - RNA, 22 nt, Artificial Sequence
  SARM1 targeting guide sequence portion
aguuggaagaccucggccaggc

SEQ ID NO: 2610 - RNA, 22 nt, Artificial Sequence
  SARM1 targeting guide sequence portion
aguuggagacgcgugugcaggc

SEQ ID NO: 2611 - RNA, 22 nt, Artificial Sequence
  SARM1 targeting guide sequence portion
auccgccucgauggcggccucg

SEQ ID NO: 2612 - RNA, 22 nt, Artificial Sequence
  SARM1 targeting guide sequence portion
aucgaggcggauggcgucgcac

SEQ ID NO: 2613 - RNA, 22 nt, Artificial Sequence
  SARM1 targeting guide sequence portion
aucugcuccagcaggcgcgcgg

SEQ ID NO: 2614 - RNA, 22 nt, Artificial Sequence
  SARM1 targeting guide sequence portion
aucuggcccaggcaccgccagc

SEQ ID NO: 2615 - RNA, 22 nt, Artificial Sequence
  SARM1 targeting guide sequence portion
auggcgaagaagcgacacagcu

SEQ ID NO: 2616 - RNA, 22 nt, Artificial Sequence
  SARM1 targeting guide sequence portion
auggcggccucgaccugcuguu

SEQ ID NO: 2617 - RNA, 22 nt, Artificial Sequence
  SARM1 targeting guide sequence portion
auggcgucgcacagacccuggg

SEQ ID NO: 2618 - RNA, 22 nt, Artificial Sequence
  SARM1 targeting guide sequence portion
augggcccgugccaccgccccc

SEQ ID NO: 2619 - RNA, 22 nt, Artificial Sequence
  SARM1 targeting guide sequence portion
augggggcgguggcacgggccc

SEQ ID NO: 2620 - RNA, 22 nt, Artificial Sequence
  SARM1 targeting guide sequence portion
augguccugacgcugcuucucu

SEQ ID NO: 2621 - RNA, 22 nt, Artificial Sequence
  SARM1 targeting guide sequence portion
augucgggcccacggccgggcg

SEQ ID NO: 2622 - RNA, 22 nt, Artificial Sequence
  SARM1 targeting guide sequence portion
caacagcaggucgaggccgcca

SEQ ID NO: 2623 - RNA, 22 nt, Artificial Sequence
  SARM1 targeting guide sequence portion
caacuccggcgccugcagcagc

SEQ ID NO: 2624 - RNA, 22 nt, Artificial Sequence
  SARM1 targeting guide sequence portion
caacugguggaggaggccuggc

SEQ ID NO: 2625 - RNA, 22 nt, Artificial Sequence
  SARM1 targeting guide sequence portion
caagcugugucgcuucuucgcc

SEQ ID NO: 2626 - RNA, 22 nt, Artificial Sequence
  SARM1 targeting guide sequence portion
caaggccugcugcagcuccggc

SEQ ID NO: 2627 - RNA, 22 nt, Artificial Sequence
  SARM1 targeting guide sequence portion
cacacgcgucuccaacuccggc

SEQ ID NO: 2628 - RNA, 22 nt, Artificial Sequence
  SARM1 targeting guide sequence portion
cacagacccugggcuaccucgc

SEQ ID NO: 2629 - RNA, 22 nt, Artificial Sequence
  SARM1 targeting guide sequence portion
cacagcuuguaggcggagagaa

SEQ ID NO: 2630 - RNA, 22 nt, Artificial Sequence
  SARM1 targeting guide sequence portion
caccaggaucugcuccagcagg

SEQ ID NO: 2631 - RNA, 22 nt, Artificial Sequence
  SARM1 targeting guide sequence portion
caccaguuggaagaccucggcc

SEQ ID NO: 2632 - RNA, 22 nt, Artificial Sequence
  SARM1 targeting guide sequence portion
caccaugggcccgugccaccgc

SEQ ID NO: 2633 - RNA, 22 nt, Artificial Sequence
  SARM1 targeting guide sequence portion
caccgaggugcaggacgcccug

SEQ ID NO: 2634 - RNA, 22 nt, Artificial Sequence
  SARM1 targeting guide sequence portion
caccgcccccaucuggcccagg

SEQ ID NO: 2635 - RNA, 22 nt, Artificial Sequence
  SARM1 targeting guide sequence portion
caccgguucucagccaccagga

SEQ ID NO: 2636 - RNA, 22 nt, Artificial Sequence
  SARM1 targeting guide sequence portion
caccucggugccugcccccggc

SEQ ID NO: 2637 - RNA, 22 nt, Artificial Sequence
  SARM1 targeting guide sequence portion
cacgcgucuccaacuccggcgc

SEQ ID NO: 2638 - RNA, 22 nt, Artificial Sequence
  SARM1 targeting guide sequence portion
cagacccugggcuaccucgcgg

SEQ ID NO: 2639 - RNA, 22 nt, Artificial Sequence
  SARM1 targeting guide sequence portion
cagauccugguggcugagaacc

SEQ ID NO: 2640 - RNA, 22 nt, Artificial Sequence
  SARM1 targeting guide sequence portion
cagaugggggcgguggcacggg

SEQ ID NO: 2641 - RNA, 22 nt, Artificial Sequence
  SARM1 targeting guide sequence portion
cagcagccaggccuccuccacc

SEQ ID NO: 2642 - RNA, 22 nt, Artificial Sequence
  SARM1 targeting guide sequence portion
cagcagccgcaacagcaggucg

SEQ ID NO: 2643 - RNA, 22 nt, Artificial Sequence
  SARM1 targeting guide sequence portion
cagcaggccuuguccgcgcuga

SEQ ID NO: 2644 - RNA, 22 nt, Artificial Sequence
  SARM1 targeting guide sequence portion
cagcaggcgcgcggccugcaca

SEQ ID NO: 2645 - RNA, 22 nt, Artificial Sequence
  SARM1 targeting guide sequence portion
cagcaggucgaggccgccaucg

SEQ ID NO: 2646 - RNA, 22 nt, Artificial Sequence
  SARM1 targeting guide sequence portion
cagccaccaggaucugcuccag

SEQ ID NO: 2647 - RNA, 22 nt, Artificial Sequence
  SARM1 targeting guide sequence portion
cagccaggccuccuccaccagu

SEQ ID NO: 2648 - RNA, 22 nt, Artificial Sequence
  SARM1 targeting guide sequence portion
cagccgcaacagcaggucgagg

SEQ ID NO: 2649 - RNA, 22 nt, Artificial Sequence
  SARM1 targeting guide sequence portion
cagcgcgcgcuccagggcgucc

SEQ ID NO: 2650 - RNA, 22 nt, Artificial Sequence
  SARM1 targeting guide sequence portion
cagcgcggacaaggccugcugc

SEQ ID NO: 2651 - RNA, 22 nt, Artificial Sequence
  SARM1 targeting guide sequence portion
cagcuccggcagcgcgcgcucc

SEQ ID NO: 2652 - RNA, 22 nt, Artificial Sequence
  SARM1 targeting guide sequence portion
cagcuuguaggcggagagaagc

SEQ ID NO: 2653 - RNA, 22 nt, Artificial Sequence
  SARM1 targeting guide sequence portion
caggacgcccuggagcgcgcgc

SEQ ID NO: 2654 - RNA, 22 nt, Artificial Sequence
  SARM1 targeting guide sequence portion
caggaucugcuccagcaggcgc

SEQ ID NO: 2655 - RNA, 22 nt, Artificial Sequence
  SARM1 targeting guide sequence portion
caggcaccgaggugcaggacgc

SEQ ID NO: 2656 - RNA, 22 nt, Artificial Sequence
  SARM1 targeting guide sequence portion
caggccgcgcgccugcuggagc

SEQ ID NO: 2657 - RNA, 22 nt, Artificial Sequence
  SARM1 targeting guide sequence portion
caggccuccuccaccaguugga

SEQ ID NO: 2658 - RNA, 22 nt, Artificial Sequence
  SARM1 targeting guide sequence portion
caggccuuguccgcgcugaagc

SEQ ID NO: 2659 - RNA, 22 nt, Artificial Sequence
  SARM1 targeting guide sequence portion
caggcgccggaguuggagacgc

SEQ ID NO: 2660 - RNA, 22 nt, Artificial Sequence
  SARM1 targeting guide sequence portion
caggcgcgcggccugcacacgc

SEQ ID NO: 2661 - RNA, 22 nt, Artificial Sequence
  SARM1 targeting guide sequence portion
cagggcguccugcaccucggug

SEQ ID NO: 2662 - RNA, 22 nt, Artificial Sequence
  SARM1 targeting guide sequence portion
cagggucugugcgacgccaucc

SEQ ID NO: 2663 - RNA, 22 nt, Artificial Sequence
  SARM1 targeting guide sequence portion
caggucgaggccgccaucgagg

SEQ ID NO: 2664 - RNA, 22 nt, Artificial Sequence
  SARM1 targeting guide sequence portion
caguuggaagaccucggccagg

SEQ ID NO: 2665 - RNA, 22 nt, Artificial Sequence
  SARM1 targeting guide sequence portion
cauccgccucgauggcggccuc

SEQ ID NO: 2666 - RNA, 22 nt, Artificial Sequence
  SARM1 targeting guide sequence portion
caucgaggcggauggcgucgca

SEQ ID NO: 2667 - RNA, 22 nt, Artificial Sequence
  SARM1 targeting guide sequence portion
caucuggcccaggcaccgccag

SEQ ID NO: 2668 - RNA, 22 nt, Artificial Sequence
  SARM1 targeting guide sequence portion
cauggcgaagaagcgacacagc

SEQ ID NO: 2669 - RNA, 22 nt, Artificial Sequence
  SARM1 targeting guide sequence portion
caugggcccgugccaccgcccc

SEQ ID NO: 2670 - RNA, 22 nt, Artificial Sequence
  SARM1 targeting guide sequence portion
caugucgggcccacggccgggc

SEQ ID NO: 2671 - RNA, 22 nt, Artificial Sequence
  SARM1 targeting guide sequence portion
ccaacuccggcgccugcagcag

SEQ ID NO: 2672 - RNA, 22 nt, Artificial Sequence
  SARM1 targeting guide sequence portion
ccaacugguggaggaggccugg

SEQ ID NO: 2673 - RNA, 22 nt, Artificial Sequence
  SARM1 targeting guide sequence portion
ccaccaggaucugcuccagcag

SEQ ID NO: 2674 - RNA, 22 nt, Artificial Sequence
  SARM1 targeting guide sequence portion
ccaccaguuggaagaccucggc

SEQ ID NO: 2675 - RNA, 22 nt, Artificial Sequence
  SARM1 targeting guide sequence portion
ccaccaugggcccgugccaccg

SEQ ID NO: 2676 - RNA, 22 nt, Artificial Sequence
  SARM1 targeting guide sequence portion
ccaccgcccccaucuggcccag

SEQ ID NO: 2677 - RNA, 22 nt, Artificial Sequence
  SARM1 targeting guide sequence portion
ccagaugggggcgguggcacgg

SEQ ID NO: 2678 - RNA, 22 nt, Artificial Sequence
  SARM1 targeting guide sequence portion
ccagcaggcgcgcggccugcac

SEQ ID NO: 2679 - RNA, 22 nt, Artificial Sequence
  SARM1 targeting guide sequence portion
ccaggaucugcuccagcaggcg

SEQ ID NO: 2680 - RNA, 22 nt, Artificial Sequence
  SARM1 targeting guide sequence portion
ccaggccuccuccaccaguugg

SEQ ID NO: 2681 - RNA, 22 nt, Artificial Sequence
  SARM1 targeting guide sequence portion
ccagggcguccugcaccucggu

SEQ ID NO: 2682 - RNA, 22 nt, Artificial Sequence
  SARM1 targeting guide sequence portion
ccagggucugugcgacgccauc

SEQ ID NO: 2683 - RNA, 22 nt, Artificial Sequence
  SARM1 targeting guide sequence portion
ccaguuggaagaccucggccag

SEQ ID NO: 2684 - RNA, 22 nt, Artificial Sequence
  SARM1 targeting guide sequence portion
ccauccgccucgauggcggccu

SEQ ID NO: 2685 - RNA, 22 nt, Artificial Sequence
  SARM1 targeting guide sequence portion
ccaucgaggcggauggcgucgc

SEQ ID NO: 2686 - RNA, 22 nt, Artificial Sequence
  SARM1 targeting guide sequence portion
ccaucuggcccaggcaccgcca

SEQ ID NO: 2687 - RNA, 22 nt, Artificial Sequence
  SARM1 targeting guide sequence portion
ccaugggcccgugccaccgccc

SEQ ID NO: 2688 - RNA, 22 nt, Artificial Sequence
  SARM1 targeting guide sequence portion
ccaugucgggcccacggccggg

SEQ ID NO: 2689 - RNA, 22 nt, Artificial Sequence
  SARM1 targeting guide sequence portion
cccaccaugggcccgugccacc

SEQ ID NO: 2690 - RNA, 22 nt, Artificial Sequence
  SARM1 targeting guide sequence portion
cccagggucugugcgacgccau

SEQ ID NO: 2691 - RNA, 22 nt, Artificial Sequence
  SARM1 targeting guide sequence portion
cccaucuggcccaggcaccgcc

SEQ ID NO: 2692 - RNA, 22 nt, Artificial Sequence
  SARM1 targeting guide sequence portion
ccccaucuggcccaggcaccgc

SEQ ID NO: 2693 - RNA, 22 nt, Artificial Sequence
  SARM1 targeting guide sequence portion
cccccaucuggcccaggcaccg

SEQ ID NO: 2694 - RNA, 22 nt, Artificial Sequence
  SARM1 targeting guide sequence portion
ccccgcgaagugucgccggggg

SEQ ID NO: 2695 - RNA, 22 nt, Artificial Sequence
  SARM1 targeting guide sequence portion
cccgacauggcgaagaagcgac

SEQ ID NO: 2696 - RNA, 22 nt, Artificial Sequence
  SARM1 targeting guide sequence portion
cccgccugcuucagcgcggaca

SEQ ID NO: 2697 - RNA, 22 nt, Artificial Sequence
  SARM1 targeting guide sequence portion
cccgcgaagugucgccgggggc

SEQ ID NO: 2698 - RNA, 22 nt, Artificial Sequence
  SARM1 targeting guide sequence portion
cccgcggccacccgcagcccac

SEQ ID NO: 2699 - RNA, 22 nt, Artificial Sequence
  SARM1 targeting guide sequence portion
cccggccgugggcccgacaugg

SEQ ID NO: 2700 - RNA, 22 nt, Artificial Sequence
  SARM1 targeting guide sequence portion
cccgugccaccgcccccaucug

SEQ ID NO: 2701 - RNA, 22 nt, Artificial Sequence
  SARM1 targeting guide sequence portion
cccuggagcgcgcgcugccgga

SEQ ID NO: 2702 - RNA, 22 nt, Artificial Sequence
  SARM1 targeting guide sequence portion
ccgacauggcgaagaagcgaca

SEQ ID NO: 2703 - RNA, 22 nt, Artificial Sequence
  SARM1 targeting guide sequence portion
ccgagcggcuggcggugccugg

SEQ ID NO: 2704 - RNA, 22 nt, Artificial Sequence
  SARM1 targeting guide sequence portion
ccgaggucuuccaacuggugga

SEQ ID NO: 2705 - RNA, 22 nt, Artificial Sequence
  SARM1 targeting guide sequence portion
ccgaggugcaggacgcccugga

SEQ ID NO: 2706 - RNA, 22 nt, Artificial Sequence
  SARM1 targeting guide sequence portion
ccgcaacagcaggucgaggccg

SEQ ID NO: 2707 - RNA, 22 nt, Artificial Sequence
  SARM1 targeting guide sequence portion
ccgccaucgaggcggauggcgu

SEQ ID NO: 2708 - RNA, 22 nt, Artificial Sequence
  SARM1 targeting guide sequence portion
ccgcccccaucuggcccaggca

SEQ ID NO: 2709 - RNA, 22 nt, Artificial Sequence
  SARM1 targeting guide sequence portion
ccgcccgccugcuucagcgcgg

SEQ ID NO: 2710 - RNA, 22 nt, Artificial Sequence
  SARM1 targeting guide sequence portion
ccgccuacaagcugugucgcuu

SEQ ID NO: 2711 - RNA, 22 nt, Artificial Sequence
  SARM1 targeting guide sequence portion
ccgccucgauggcggccucgac

SEQ ID NO: 2712 - RNA, 22 nt, Artificial Sequence
  SARM1 targeting guide sequence portion
ccgccugcuucagcgcggacaa

SEQ ID NO: 2713 - RNA, 22 nt, Artificial Sequence
  SARM1 targeting guide sequence portion
ccgcgaagugucgccgggggca

SEQ ID NO: 2714 - RNA, 22 nt, Artificial Sequence
  SARM1 targeting guide sequence portion
ccgcgagguagcccagggucug

SEQ ID NO: 2715 - RNA, 22 nt, Artificial Sequence
  SARM1 targeting guide sequence portion
ccgcgcgccugcuggagcagau

SEQ ID NO: 2716 - RNA, 22 nt, Artificial Sequence
  SARM1 targeting guide sequence portion
ccgcggccacccgcagcccacc

SEQ ID NO: 2717 - RNA, 22 nt, Artificial Sequence
  SARM1 targeting guide sequence portion
ccggagcugcagcaggccuugu

SEQ ID NO: 2718 - RNA, 22 nt, Artificial Sequence
  SARM1 targeting guide sequence portion
ccggaguuggagacgcgugugc

SEQ ID NO: 2719 - RNA, 22 nt, Artificial Sequence
  SARM1 targeting guide sequence portion
ccggcagcgcgcgcuccagggc

SEQ ID NO: 2720 - RNA, 22 nt, Artificial Sequence
  SARM1 targeting guide sequence portion
ccggccgugggcccgacauggc

SEQ ID NO: 2721 - RNA, 22 nt, Artificial Sequence
  SARM1 targeting guide sequence portion
ccggccuggccgaggucuucca

SEQ ID NO: 2722 - RNA, 22 nt, Artificial Sequence
  SARM1 targeting guide sequence portion
ccggcgccugcagcagccgcaa

SEQ ID NO: 2723 - RNA, 22 nt, Artificial Sequence
  SARM1 targeting guide sequence portion
ccgggggcaggcaccgaggugc

SEQ ID NO: 2724 - RNA, 22 nt, Artificial Sequence
  SARM1 targeting guide sequence portion
ccgguucucagccaccaggauc

SEQ ID NO: 2725 - RNA, 22 nt, Artificial Sequence
  SARM1 targeting guide sequence portion
ccgugccaccgcccccaucugg

SEQ ID NO: 2726 - RNA, 22 nt, Artificial Sequence
  SARM1 targeting guide sequence portion
ccgugggcccgacauggcgaag

SEQ ID NO: 2727 - RNA, 22 nt, Artificial Sequence
  SARM1 targeting guide sequence portion
ccgugggccgcgagguagccca

SEQ ID NO: 2728 - RNA, 22 nt, Artificial Sequence
  SARM1 targeting guide sequence portion
ccgugggcgccggccuggccga

SEQ ID NO: 2729 - RNA, 22 nt, Artificial Sequence
  SARM1 targeting guide sequence portion
ccuacaagcugugucgcuucuu

SEQ ID NO: 2730 - RNA, 22 nt, Artificial Sequence
  SARM1 targeting guide sequence portion
ccuccaccaguuggaagaccuc

SEQ ID NO: 2731 - RNA, 22 nt, Artificial Sequence
  SARM1 targeting guide sequence portion
ccuccuccaccaguuggaagac

SEQ ID NO: 2732 - RNA, 22 nt, Artificial Sequence
  SARM1 targeting guide sequence portion
ccucgaccugcuguugcggcug

SEQ ID NO: 2733 - RNA, 22 nt, Artificial Sequence
  SARM1 targeting guide sequence portion
ccucgauggcggccucgaccug

SEQ ID NO: 2734 - RNA, 22 nt, Artificial Sequence
  SARM1 targeting guide sequence portion
ccucgcggcccacggccggcag

SEQ ID NO: 2735 - RNA, 22 nt, Artificial Sequence
  SARM1 targeting guide sequence portion
ccucggugccugcccccggcga

SEQ ID NO: 2736 - RNA, 22 nt, Artificial Sequence
  SARM1 targeting guide sequence portion
ccugacgcugcuucucuccgcc

SEQ ID NO: 2737 - RNA, 22 nt, Artificial Sequence
  SARM1 targeting guide sequence portion
ccugcacacgcgucuccaacuc

SEQ ID NO: 2738 - RNA, 22 nt, Artificial Sequence
  SARM1 targeting guide sequence portion
ccugcaccucggugccugcccc

SEQ ID NO: 2739 - RNA, 22 nt, Artificial Sequence
  SARM1 targeting guide sequence portion
ccugcagcagccgcaacagcag

SEQ ID NO: 2740 - RNA, 22 nt, Artificial Sequence
  SARM1 targeting guide sequence portion
ccugcccccggcgacacuucgc

SEQ ID NO: 2741 - RNA, 22 nt, Artificial Sequence
  SARM1 targeting guide sequence portion
ccugcugcagcuccggcagcgc

SEQ ID NO: 2742 - RNA, 22 nt, Artificial Sequence
  SARM1 targeting guide sequence portion
ccugcuggagcagauccuggug

SEQ ID NO: 2743 - RNA, 22 nt, Artificial Sequence
  SARM1 targeting guide sequence portion
ccugcuguugcggcugcugcag

SEQ ID NO: 2744 - RNA, 22 nt, Artificial Sequence
  SARM1 targeting guide sequence portion
ccugcuucagcgcggacaaggc

SEQ ID NO: 2745 - RNA, 22 nt, Artificial Sequence
  SARM1 targeting guide sequence portion
ccuggagcgcgcgcugccggag

SEQ ID NO: 2746 - RNA, 22 nt, Artificial Sequence
  SARM1 targeting guide sequence portion
ccuggccgaggucuuccaacug

SEQ ID NO: 2747 - RNA, 22 nt, Artificial Sequence
  SARM1 targeting guide sequence portion
ccugggccagaugggggcggug

SEQ ID NO: 2748 - RNA, 22 nt, Artificial Sequence
  SARM1 targeting guide sequence portion
ccuuguccgcgcugaagcaggc

SEQ ID NO: 2749 - RNA, 22 nt, Artificial Sequence
  SARM1 targeting guide sequence portion
cgaagaagcgacacagcuugua

SEQ ID NO: 2750 - RNA, 22 nt, Artificial Sequence
  SARM1 targeting guide sequence portion
cgaagugucgccgggggcaggc

SEQ ID NO: 2751 - RNA, 22 nt, Artificial Sequence
  SARM1 targeting guide sequence portion
cgacacagcuuguaggcggaga

SEQ ID NO: 2752 - RNA, 22 nt, Artificial Sequence
  SARM1 targeting guide sequence portion
cgacacuucgcggggcccgcgg

SEQ ID NO: 2753 - RNA, 22 nt, Artificial Sequence
  SARM1 targeting guide sequence portion
cgacauggcgaagaagcgacac

SEQ ID NO: 2754 - RNA, 22 nt, Artificial Sequence
  SARM1 targeting guide sequence portion
cgaccugcuguugcggcugcug

SEQ ID NO: 2755 - RNA, 22 nt, Artificial Sequence
  SARM1 targeting guide sequence portion
cgacgccauccgccucgauggc

SEQ ID NO: 2756 - RNA, 22 nt, Artificial Sequence
  SARM1 targeting guide sequence portion
cgagcggcuggcggugccuggg

SEQ ID NO: 2757 - RNA, 22 nt, Artificial Sequence
  SARM1 targeting guide sequence portion
cgaggccgccaucgaggcggau

SEQ ID NO: 2758 - RNA, 22 nt, Artificial Sequence
  SARM1 targeting guide sequence portion
cgaggcggauggcgucgcacag

SEQ ID NO: 2759 - RNA, 22 nt, Artificial Sequence
  SARM1 targeting guide sequence portion
cgagguagcccagggucugugc

SEQ ID NO: 2760 - RNA, 22 nt, Artificial Sequence
  SARM1 targeting guide sequence portion
cgaggucuuccaacugguggag

SEQ ID NO: 2761 - RNA, 22 nt, Artificial Sequence
  SARM1 targeting guide sequence portion
cgaggugcaggacgcccuggag

SEQ ID NO: 2762 - RNA, 22 nt, Artificial Sequence
  SARM1 targeting guide sequence portion
cgauggcggccucgaccugcug

SEQ ID NO: 2763 - RNA, 22 nt, Artificial Sequence
  SARM1 targeting guide sequence portion
cgcaacagcaggucgaggccgc

SEQ ID NO: 2764 - RNA, 22 nt, Artificial Sequence
  SARM1 targeting guide sequence portion
cgcacagacccugggcuaccuc

SEQ ID NO: 2765 - RNA, 22 nt, Artificial Sequence
  SARM1 targeting guide sequence portion
cgccauccgccucgauggcggc

SEQ ID NO: 2766 - RNA, 22 nt, Artificial Sequence
  SARM1 targeting guide sequence portion
cgccaucgaggcggauggcguc

SEQ ID NO: 2767 - RNA, 22 nt, Artificial Sequence
  SARM1 targeting guide sequence portion
cgcccccaucuggcccaggcac

SEQ ID NO: 2768 - RNA, 22 nt, Artificial Sequence
  SARM1 targeting guide sequence portion
cgcccgccugcuucagcgcgga

SEQ ID NO: 2769 - RNA, 22 nt, Artificial Sequence
  SARM1 targeting guide sequence portion
cgcccggccgugggcccgacau

SEQ ID NO: 2770 - RNA, 22 nt, Artificial Sequence
  SARM1 targeting guide sequence portion
cgcccuggagcgcgcgcugccg

SEQ ID NO: 2771 - RNA, 22 nt, Artificial Sequence
  SARM1 targeting guide sequence portion
cgccgagcggcuggcggugccu

SEQ ID NO: 2772 - RNA, 22 nt, Artificial Sequence
  SARM1 targeting guide sequence portion
cgccgcccgccugcuucagcgc

SEQ ID NO: 2773 - RNA, 22 nt, Artificial Sequence
  SARM1 targeting guide sequence portion
cgccggaguuggagacgcgugu

SEQ ID NO: 2774 - RNA, 22 nt, Artificial Sequence
  SARM1 targeting guide sequence portion
cgccggccuggccgaggucuuc

SEQ ID NO: 2775 - RNA, 22 nt, Artificial Sequence
  SARM1 targeting guide sequence portion
cgccgggggcaggcaccgaggu

SEQ ID NO: 2776 - RNA, 22 nt, Artificial Sequence
  SARM1 targeting guide sequence portion
cgccuacaagcugugucgcuuc

SEQ ID NO: 2777 - RNA, 22 nt, Artificial Sequence
  SARM1 targeting guide sequence portion
cgccucgauggcggccucgacc

SEQ ID NO: 2778 - RNA, 22 nt, Artificial Sequence
  SARM1 targeting guide sequence portion
cgccugcagcagccgcaacagc

SEQ ID NO: 2779 - RNA, 22 nt, Artificial Sequence
  SARM1 targeting guide sequence portion
cgccugcuggagcagauccugg

SEQ ID NO: 2780 - RNA, 22 nt, Artificial Sequence
  SARM1 targeting guide sequence portion
cgccugcuucagcgcggacaag

SEQ ID NO: 2781 - RNA, 22 nt, Artificial Sequence
  SARM1 targeting guide sequence portion
cgcgaagugucgccgggggcag

SEQ ID NO: 2782 - RNA, 22 nt, Artificial Sequence
  SARM1 targeting guide sequence portion
cgcgagguagcccagggucugu

SEQ ID NO: 2783 - RNA, 22 nt, Artificial Sequence
  SARM1 targeting guide sequence portion
cgcgccgcccgccugcuucagc

SEQ ID NO: 2784 - RNA, 22 nt, Artificial Sequence
  SARM1 targeting guide sequence portion
cgcgccugcuggagcagauccu

SEQ ID NO: 2785 - RNA, 22 nt, Artificial Sequence
  SARM1 targeting guide sequence portion
cgcgcgccugcuggagcagauc

SEQ ID NO: 2786 - RNA, 22 nt, Artificial Sequence
  SARM1 targeting guide sequence portion
cgcgcgcuccagggcguccugc

SEQ ID NO: 2787 - RNA, 22 nt, Artificial Sequence
  SARM1 targeting guide sequence portion
cgcgcgcugccggagcugcagc

SEQ ID NO: 2788 - RNA, 22 nt, Artificial Sequence
  SARM1 targeting guide sequence portion
cgcgcggccugcacacgcgucu

SEQ ID NO: 2789 - RNA, 22 nt, Artificial Sequence
  SARM1 targeting guide sequence portion
cgcgcuccagggcguccugcac

SEQ ID NO: 2790 - RNA, 22 nt, Artificial Sequence
  SARM1 targeting guide sequence portion
cgcgcugccggagcugcagcag

SEQ ID NO: 2791 - RNA, 22 nt, Artificial Sequence
  SARM1 targeting guide sequence portion
cgcggacaaggccugcugcagc

SEQ ID NO: 2792 - RNA, 22 nt, Artificial Sequence
  SARM1 targeting guide sequence portion
cgcggccugcacacgcgucucc

SEQ ID NO: 2793 - RNA, 22 nt, Artificial Sequence
  SARM1 targeting guide sequence portion
cgcgucuccaacuccggcgccu

SEQ ID NO: 2794 - RNA, 22 nt, Artificial Sequence
  SARM1 targeting guide sequence portion
cgcgugugcaggccgcgcgccu

SEQ ID NO: 2795 - RNA, 22 nt, Artificial Sequence
  SARM1 targeting guide sequence portion
cgcucaccgguucucagccacc

SEQ ID NO: 2796 - RNA, 22 nt, Artificial Sequence
  SARM1 targeting guide sequence portion
cgcuccagggcguccugcaccu

SEQ ID NO: 2797 - RNA, 22 nt, Artificial Sequence
  SARM1 targeting guide sequence portion
cgcugccggagcugcagcaggc

SEQ ID NO: 2798 - RNA, 22 nt, Artificial Sequence
  SARM1 targeting guide sequence portion
cgcugcuucucuccgccuacaa

SEQ ID NO: 2799 - RNA, 22 nt, Artificial Sequence
  SARM1 targeting guide sequence portion
cgcuucuucgccaugucgggcc

SEQ ID NO: 2800 - RNA, 22 nt, Artificial Sequence
  SARM1 targeting guide sequence portion
cggacaaggccugcugcagcuc

SEQ ID NO: 2801 - RNA, 22 nt, Artificial Sequence
  SARM1 targeting guide sequence portion
cggagcugcagcaggccuuguc

SEQ ID NO: 2802 - RNA, 22 nt, Artificial Sequence
  SARM1 targeting guide sequence portion
cggaguuggagacgcgugugca

SEQ ID NO: 2803 - RNA, 22 nt, Artificial Sequence
  SARM1 targeting guide sequence portion
cggauggcgucgcacagacccu

SEQ ID NO: 2804 - RNA, 22 nt, Artificial Sequence
  SARM1 targeting guide sequence portion
cggcagcgcgcgcuccagggcg

SEQ ID NO: 2805 - RNA, 22 nt, Artificial Sequence
  SARM1 targeting guide sequence portion
cggcccacggccggcagcagcc

SEQ ID NO: 2806 - RNA, 22 nt, Artificial Sequence
  SARM1 targeting guide sequence portion
cggccgugggcccgacauggcg

SEQ ID NO: 2807 - RNA, 22 nt, Artificial Sequence
  SARM1 targeting guide sequence portion
cggccucgaccugcuguugcgg

SEQ ID NO: 2808 - RNA, 22 nt, Artificial Sequence
  SARM1 targeting guide sequence portion
cggccugcacacgcgucuccaa

SEQ ID NO: 2809 - RNA, 22 nt, Artificial Sequence
  SARM1 targeting guide sequence portion
cggccuggccgaggucuuccaa

SEQ ID NO: 2810 - RNA, 22 nt, Artificial Sequence
  SARM1 targeting guide sequence portion
cggcgacacuucgcggggcccg

SEQ ID NO: 2811 - RNA, 22 nt, Artificial Sequence
  SARM1 targeting guide sequence portion
cggcgccugcagcagccgcaac

SEQ ID NO: 2812 - RNA, 22 nt, Artificial Sequence
  SARM1 targeting guide sequence portion
cggcugcugcaggcgccggagu

SEQ ID NO: 2813 - RNA, 22 nt, Artificial Sequence
  SARM1 targeting guide sequence portion
cggcuggcggugccugggccag

SEQ ID NO: 2814 - RNA, 22 nt, Artificial Sequence
  SARM1 targeting guide sequence portion
cgggccccgcgaagugucgccg

SEQ ID NO: 2815 - RNA, 22 nt, Artificial Sequence
  SARM1 targeting guide sequence portion
cgggggcaggcaccgaggugca

SEQ ID NO: 2816 - RNA, 22 nt, Artificial Sequence
  SARM1 targeting guide sequence portion
cggguggccgcgggccccgcga

SEQ ID NO: 2817 - RNA, 22 nt, Artificial Sequence
  SARM1 targeting guide sequence portion
cggugccugcccccggcgacac

SEQ ID NO: 2818 - RNA, 22 nt, Artificial Sequence
  SARM1 targeting guide sequence portion
cggugccugggccagauggggg

SEQ ID NO: 2819 - RNA, 22 nt, Artificial Sequence
  SARM1 targeting guide sequence portion
cgguucucagccaccaggaucu

SEQ ID NO: 2820 - RNA, 22 nt, Artificial Sequence
  SARM1 targeting guide sequence portion
cguccugcaccucggugccugc

SEQ ID NO: 2821 - RNA, 22 nt, Artificial Sequence
  SARM1 targeting guide sequence portion
cgucgcacagacccugggcuac

SEQ ID NO: 2822 - RNA, 22 nt, Artificial Sequence
  SARM1 targeting guide sequence portion
cgucuccaacuccggcgccugc

SEQ ID NO: 2823 - RNA, 22 nt, Artificial Sequence
  SARM1 targeting guide sequence portion
cgugccaccgcccccaucuggc

SEQ ID NO: 2824 - RNA, 22 nt, Artificial Sequence
  SARM1 targeting guide sequence portion
cgugggcccgacauggcgaaga

SEQ ID NO: 2825 - RNA, 22 nt, Artificial Sequence
  SARM1 targeting guide sequence portion
cgugggccgcgagguagcccag

SEQ ID NO: 2826 - RNA, 22 nt, Artificial Sequence
  SARM1 targeting guide sequence portion
cgugggcgccggccuggccgag

SEQ ID NO: 2827 - RNA, 22 nt, Artificial Sequence
  SARM1 targeting guide sequence portion
cgugugcaggccgcgcgccugc

SEQ ID NO: 2828 - RNA, 22 nt, Artificial Sequence
  SARM1 targeting guide sequence portion
cuacaagcugugucgcuucuuc

SEQ ID NO: 2829 - RNA, 22 nt, Artificial Sequence
  SARM1 targeting guide sequence portion
cucaccgguucucagccaccag

SEQ ID NO: 2830 - RNA, 22 nt, Artificial Sequence
  SARM1 targeting guide sequence portion
cucagccaccaggaucugcucc

SEQ ID NO: 2831 - RNA, 22 nt, Artificial Sequence
  SARM1 targeting guide sequence portion
cuccaacuccggcgccugcagc

SEQ ID NO: 2832 - RNA, 22 nt, Artificial Sequence
  SARM1 targeting guide sequence portion
cuccaccaguuggaagaccucg

SEQ ID NO: 2833 - RNA, 22 nt, Artificial Sequence
  SARM1 targeting guide sequence portion
cuccagcaggcgcgcggccugc

SEQ ID NO: 2834 - RNA, 22 nt, Artificial Sequence
  SARM1 targeting guide sequence portion
cuccagggcguccugcaccucg

SEQ ID NO: 2835 - RNA, 22 nt, Artificial Sequence
  SARM1 targeting guide sequence portion
cuccgccuacaagcugugucgc

SEQ ID NO: 2836 - RNA, 22 nt, Artificial Sequence
  SARM1 targeting guide sequence portion
cuccggcagcgcgcgcuccagg

SEQ ID NO: 2837 - RNA, 22 nt, Artificial Sequence
  SARM1 targeting guide sequence portion
cuccggcgccugcagcagccgc

SEQ ID NO: 2838 - RNA, 22 nt, Artificial Sequence
  SARM1 targeting guide sequence portion
cuccuccaccaguuggaagacc

SEQ ID NO: 2839 - RNA, 22 nt, Artificial Sequence
  SARM1 targeting guide sequence portion
cucgaccugcuguugcggcugc

SEQ ID NO: 2840 - RNA, 22 nt, Artificial Sequence
  SARM1 targeting guide sequence portion
cucgauggcggccucgaccugc

SEQ ID NO: 2841 - RNA, 22 nt, Artificial Sequence
  SARM1 targeting guide sequence portion
cucgcggcccacggccggcagc

SEQ ID NO: 2842 - RNA, 22 nt, Artificial Sequence
  SARM1 targeting guide sequence portion
cucggcgcccggccgugggccc

SEQ ID NO: 2843 - RNA, 22 nt, Artificial Sequence
  SARM1 targeting guide sequence portion
cucggugccugcccccggcgac

SEQ ID NO: 2844 - RNA, 22 nt, Artificial Sequence
  SARM1 targeting guide sequence portion
cucuccgccuacaagcuguguc

SEQ ID NO: 2845 - RNA, 22 nt, Artificial Sequence
  SARM1 targeting guide sequence portion
cugacgcugcuucucuccgccu

SEQ ID NO: 2846 - RNA, 22 nt, Artificial Sequence
  SARM1 targeting guide sequence portion
cugcacacgcgucuccaacucc

SEQ ID NO: 2847 - RNA, 22 nt, Artificial Sequence
  SARM1 targeting guide sequence portion
cugcaccucggugccugccccc

SEQ ID NO: 2848 - RNA, 22 nt, Artificial Sequence
  SARM1 targeting guide sequence portion
cugcagcagccgcaacagcagg

SEQ ID NO: 2849 - RNA, 22 nt, Artificial Sequence
  SARM1 targeting guide sequence portion
cugcagcaggccuuguccgcgc

SEQ ID NO: 2850 - RNA, 22 nt, Artificial Sequence
  SARM1 targeting guide sequence portion
cugcagcuccggcagcgcgcgc

SEQ ID NO: 2851 - RNA, 22 nt, Artificial Sequence
  SARM1 targeting guide sequence portion
cugcaggcgccggaguuggaga

SEQ ID NO: 2852 - RNA, 22 nt, Artificial Sequence
  SARM1 targeting guide sequence portion
cugcccccggcgacacuucgcg

SEQ ID NO: 2853 - RNA, 22 nt, Artificial Sequence
  SARM1 targeting guide sequence portion
cugccggagcugcagcaggccu

SEQ ID NO: 2854 - RNA, 22 nt, Artificial Sequence
  SARM1 targeting guide sequence portion
cugccggccgugggccgcgagg

SEQ ID NO: 2855 - RNA, 22 nt, Artificial Sequence
  SARM1 targeting guide sequence portion
cugcggguggccgcgggccccg

SEQ ID NO: 2856 - RNA, 22 nt, Artificial Sequence
  SARM1 targeting guide sequence portion
cugcuccagcaggcgcgcggcc

SEQ ID NO: 2857 - RNA, 22 nt, Artificial Sequence
  SARM1 targeting guide sequence portion
cugcugcagcuccggcagcgcg

SEQ ID NO: 2858 - RNA, 22 nt, Artificial Sequence
  SARM1 targeting guide sequence portion
cugcugcaggcgccggaguugg

SEQ ID NO: 2859 - RNA, 22 nt, Artificial Sequence
  SARM1 targeting guide sequence portion
cugcugccggccgugggccgcg

SEQ ID NO: 2860 - RNA, 22 nt, Artificial Sequence
  SARM1 targeting guide sequence portion
cugcuggagcagauccuggugg

SEQ ID NO: 2861 - RNA, 22 nt, Artificial Sequence
  SARM1 targeting guide sequence portion
cugcuguugcggcugcugcagg

SEQ ID NO: 2862 - RNA, 22 nt, Artificial Sequence
  SARM1 targeting guide sequence portion
cugcuucagcgcggacaaggcc

SEQ ID NO: 2863 - RNA, 22 nt, Artificial Sequence
  SARM1 targeting guide sequence portion
cugcuucucuccgccuacaagc

SEQ ID NO: 2864 - RNA, 22 nt, Artificial Sequence
  SARM1 targeting guide sequence portion
cuggagcagauccugguggcug

SEQ ID NO: 2865 - RNA, 22 nt, Artificial Sequence
  SARM1 targeting guide sequence portion
cuggagcgcgcgcugccggagc

SEQ ID NO: 2866 - RNA, 22 nt, Artificial Sequence
  SARM1 targeting guide sequence portion
cuggcccaggcaccgccagccg

SEQ ID NO: 2867 - RNA, 22 nt, Artificial Sequence
  SARM1 targeting guide sequence portion
cuggccgaggucuuccaacugg

SEQ ID NO: 2868 - RNA, 22 nt, Artificial Sequence
  SARM1 targeting guide sequence portion
cuggcggugccugggccagaug

SEQ ID NO: 2869 - RNA, 22 nt, Artificial Sequence
  SARM1 targeting guide sequence portion
cugggccagaugggggcggugg

SEQ ID NO: 2870 - RNA, 22 nt, Artificial Sequence
  SARM1 targeting guide sequence portion
cugugcgacgccauccgccucg

SEQ ID NO: 2871 - RNA, 22 nt, Artificial Sequence
  SARM1 targeting guide sequence portion
cugugucgcuucuucgccaugu

SEQ ID NO: 2872 - RNA, 22 nt, Artificial Sequence
  SARM1 targeting guide sequence portion
cuguugcggcugcugcaggcgc

SEQ ID NO: 2873 - RNA, 22 nt, Artificial Sequence
  SARM1 targeting guide sequence portion
cuucagcgcggacaaggccugc

SEQ ID NO: 2874 - RNA, 22 nt, Artificial Sequence
  SARM1 targeting guide sequence portion
cuuccaacugguggaggaggcc

SEQ ID NO: 2875 - RNA, 22 nt, Artificial Sequence
  SARM1 targeting guide sequence portion
cuucgccaugucgggcccacgg

SEQ ID NO: 2876 - RNA, 22 nt, Artificial Sequence
  SARM1 targeting guide sequence portion
cuucucuccgccuacaagcugu

SEQ ID NO: 2877 - RNA, 22 nt, Artificial Sequence
  SARM1 targeting guide sequence portion
cuucuucgccaugucgggccca

SEQ ID NO: 2878 - RNA, 22 nt, Artificial Sequence
  SARM1 targeting guide sequence portion
cuuguaggcggagagaagcagc

SEQ ID NO: 2879 - RNA, 22 nt, Artificial Sequence
  SARM1 targeting guide sequence portion
cuuguccgcgcugaagcaggcg

SEQ ID NO: 2880 - RNA, 22 nt, Artificial Sequence
  SARM1 targeting guide sequence portion
gaagaagcgacacagcuuguag

SEQ ID NO: 2881 - RNA, 22 nt, Artificial Sequence
  SARM1 targeting guide sequence portion
gaagaccucggccaggccggcg

SEQ ID NO: 2882 - RNA, 22 nt, Artificial Sequence
  SARM1 targeting guide sequence portion
gaagcgacacagcuuguaggcg

SEQ ID NO: 2883 - RNA, 22 nt, Artificial Sequence
  SARM1 targeting guide sequence portion
gaagugucgccgggggcaggca

SEQ ID NO: 2884 - RNA, 22 nt, Artificial Sequence
  SARM1 targeting guide sequence portion
gacaaggccugcugcagcuccg

SEQ ID NO: 2885 - RNA, 22 nt, Artificial Sequence
  SARM1 targeting guide sequence portion
gacacagcuuguaggcggagag

SEQ ID NO: 2886 - RNA, 22 nt, Artificial Sequence
  SARM1 targeting guide sequence portion
gacacuucgcggggcccgcggc

SEQ ID NO: 2887 - RNA, 22 nt, Artificial Sequence
  SARM1 targeting guide sequence portion
gacauggcgaagaagcgacaca

SEQ ID NO: 2888 - RNA, 22 nt, Artificial Sequence
  SARM1 targeting guide sequence portion
gacccugggcuaccucgcggcc

SEQ ID NO: 2889 - RNA, 22 nt, Artificial Sequence
  SARM1 targeting guide sequence portion
gaccugcuguugcggcugcugc

SEQ ID NO: 2890 - RNA, 22 nt, Artificial Sequence
  SARM1 targeting guide sequence portion
gacgccauccgccucgauggcg

SEQ ID NO: 2891 - RNA, 22 nt, Artificial Sequence
  SARM1 targeting guide sequence portion
gacgcccuggagcgcgcgcugc

SEQ ID NO: 2892 - RNA, 22 nt, Artificial Sequence
  SARM1 targeting guide sequence portion
gacgcgugugcaggccgcgcgc

SEQ ID NO: 2893 - RNA, 22 nt, Artificial Sequence
  SARM1 targeting guide sequence portion
gacgcugcuucucuccgccuac

SEQ ID NO: 2894 - RNA, 22 nt, Artificial Sequence
  SARM1 targeting guide sequence portion
gagacgcgugugcaggccgcgc

SEQ ID NO: 2895 - RNA, 22 nt, Artificial Sequence
  SARM1 targeting guide sequence portion
gagcagauccugguggcugaga

SEQ ID NO: 2896 - RNA, 22 nt, Artificial Sequence
  SARM1 targeting guide sequence portion
gagcgcgcgcugccggagcugc

SEQ ID NO: 2897 - RNA, 22 nt, Artificial Sequence
  SARM1 targeting guide sequence portion
gagcggcuggcggugccugggc

SEQ ID NO: 2898 - RNA, 22 nt, Artificial Sequence
  SARM1 targeting guide sequence portion
gagcugcagcaggccuuguccg

SEQ ID NO: 2899 - RNA, 22 nt, Artificial Sequence
  SARM1 targeting guide sequence portion
gaggccgccaucgaggcggaug

SEQ ID NO: 2900 - RNA, 22 nt, Artificial Sequence
  SARM1 targeting guide sequence portion
gaggcggauggcgucgcacaga

SEQ ID NO: 2901 - RNA, 22 nt, Artificial Sequence
  SARM1 targeting guide sequence portion
gagguagcccagggucugugcg

SEQ ID NO: 2902 - RNA, 22 nt, Artificial Sequence
  SARM1 targeting guide sequence portion
gaggucuuccaacugguggagg

SEQ ID NO: 2903 - RNA, 22 nt, Artificial Sequence
  SARM1 targeting guide sequence portion
gaggugcaggacgcccuggagc

SEQ ID NO: 2904 - RNA, 22 nt, Artificial Sequence
  SARM1 targeting guide sequence portion
gaguuggagacgcgugugcagg

SEQ ID NO: 2905 - RNA, 22 nt, Artificial Sequence
  SARM1 targeting guide sequence portion
gauccugguggcugagaaccgg

SEQ ID NO: 2906 - RNA, 22 nt, Artificial Sequence
  SARM1 targeting guide sequence portion
gaucugcuccagcaggcgcgcg

SEQ ID NO: 2907 - RNA, 22 nt, Artificial Sequence
  SARM1 targeting guide sequence portion
gauggcggccucgaccugcugu

SEQ ID NO: 2908 - RNA, 22 nt, Artificial Sequence
  SARM1 targeting guide sequence portion
gauggcgucgcacagacccugg

SEQ ID NO: 2909 - RNA, 22 nt, Artificial Sequence
  SARM1 targeting guide sequence portion
gaugggggcgguggcacgggcc

SEQ ID NO: 2910 - RNA, 22 nt, Artificial Sequence
  SARM1 targeting guide sequence portion
gcaacagcaggucgaggccgcc

SEQ ID NO: 2911 - RNA, 22 nt, Artificial Sequence
  SARM1 targeting guide sequence portion
gcacacgcgucuccaacuccgg

SEQ ID NO: 2912 - RNA, 22 nt, Artificial Sequence
  SARM1 targeting guide sequence portion
gcacagacccugggcuaccucg

SEQ ID NO: 2913 - RNA, 22 nt, Artificial Sequence
  SARM1 targeting guide sequence portion
gcaccgaggugcaggacgcccu

SEQ ID NO: 2914 - RNA, 22 nt, Artificial Sequence
  SARM1 targeting guide sequence portion
gcaccucggugccugcccccgg

SEQ ID NO: 2915 - RNA, 22 nt, Artificial Sequence
  SARM1 targeting guide sequence portion
gcagauccugguggcugagaac

SEQ ID NO: 2916 - RNA, 22 nt, Artificial Sequence
  SARM1 targeting guide sequence portion
gcagcagccaggccuccuccac

SEQ ID NO: 2917 - RNA, 22 nt, Artificial Sequence
  SARM1 targeting guide sequence portion
gcagcagccgcaacagcagguc

SEQ ID NO: 2918 - RNA, 22 nt, Artificial Sequence
  SARM1 targeting guide sequence portion
gcagcaggccuuguccgcgcug

SEQ ID NO: 2919 - RNA, 22 nt, Artificial Sequence
  SARM1 targeting guide sequence portion
gcagccaggccuccuccaccag

SEQ ID NO: 2920 - RNA, 22 nt, Artificial Sequence
  SARM1 targeting guide sequence portion
gcagccgcaacagcaggucgag

SEQ ID NO: 2921 - RNA, 22 nt, Artificial Sequence
  SARM1 targeting guide sequence portion
gcagcgcgcgcuccagggcguc

SEQ ID NO: 2922 - RNA, 22 nt, Artificial Sequence
  SARM1 targeting guide sequence portion
gcagcuccggcagcgcgcgcuc

SEQ ID NO: 2923 - RNA, 22 nt, Artificial Sequence
  SARM1 targeting guide sequence portion
gcaggacgcccuggagcgcgcg

SEQ ID NO: 2924 - RNA, 22 nt, Artificial Sequence
  SARM1 targeting guide sequence portion
gcaggcaccgaggugcaggacg

SEQ ID NO: 2925 - RNA, 22 nt, Artificial Sequence
  SARM1 targeting guide sequence portion
gcaggccgcgcgccugcuggag

SEQ ID NO: 2926 - RNA, 22 nt, Artificial Sequence
  SARM1 targeting guide sequence portion
gcaggccuuguccgcgcugaag

SEQ ID NO: 2927 - RNA, 22 nt, Artificial Sequence
  SARM1 targeting guide sequence portion
gcaggcgccggaguuggagacg

SEQ ID NO: 2928 - RNA, 22 nt, Artificial Sequence
  SARM1 targeting guide sequence portion
gcaggcgcgcggccugcacacg

SEQ ID NO: 2929 - RNA, 22 nt, Artificial Sequence
  SARM1 targeting guide sequence portion
gcaggucgaggccgccaucgag

SEQ ID NO: 2930 - RNA, 22 nt, Artificial Sequence
  SARM1 targeting guide sequence portion
gccaccaggaucugcuccagca

SEQ ID NO: 2931 - RNA, 22 nt, Artificial Sequence
  SARM1 targeting guide sequence portion
gccaccgcccccaucuggccca

SEQ ID NO: 2932 - RNA, 22 nt, Artificial Sequence
  SARM1 targeting guide sequence portion
gccagaugggggcgguggcacg

SEQ ID NO: 2933 - RNA, 22 nt, Artificial Sequence
  SARM1 targeting guide sequence portion
gccaggccuccuccaccaguug

SEQ ID NO: 2934 - RNA, 22 nt, Artificial Sequence
  SARM1 targeting guide sequence portion
gccauccgccucgauggcggcc

SEQ ID NO: 2935 - RNA, 22 nt, Artificial Sequence
  SARM1 targeting guide sequence portion
gccaucgaggcggauggcgucg

SEQ ID NO: 2936 - RNA, 22 nt, Artificial Sequence
  SARM1 targeting guide sequence portion
gcccaccaugggcccgugccac

SEQ ID NO: 2937 - RNA, 22 nt, Artificial Sequence
  SARM1 targeting guide sequence portion
gcccagggucugugcgacgcca

SEQ ID NO: 2938 - RNA, 22 nt, Artificial Sequence
  SARM1 targeting guide sequence portion
gcccccaucuggcccaggcacc

SEQ ID NO: 2939 - RNA, 22 nt, Artificial Sequence
  SARM1 targeting guide sequence portion
gccccgcgaagugucgccgggg

SEQ ID NO: 2940 - RNA, 22 nt, Artificial Sequence
  SARM1 targeting guide sequence portion
gcccgacauggcgaagaagcga

SEQ ID NO: 2941 - RNA, 22 nt, Artificial Sequence
  SARM1 targeting guide sequence portion
gcccgccugcuucagcgcggac

SEQ ID NO: 2942 - RNA, 22 nt, Artificial Sequence
  SARM1 targeting guide sequence portion
gcccgcggccacccgcagccca

SEQ ID NO: 2943 - RNA, 22 nt, Artificial Sequence
  SARM1 targeting guide sequence portion
gcccggccgugggcccgacaug

SEQ ID NO: 2944 - RNA, 22 nt, Artificial Sequence
  SARM1 targeting guide sequence portion
gcccgugccaccgcccccaucu

SEQ ID NO: 2945 - RNA, 22 nt, Artificial Sequence
  SARM1 targeting guide sequence portion
gcccuggagcgcgcgcugccgg

SEQ ID NO: 2946 - RNA, 22 nt, Artificial Sequence
  SARM1 targeting guide sequence portion
gccgagcggcuggcggugccug

SEQ ID NO: 2947 - RNA, 22 nt, Artificial Sequence
  SARM1 targeting guide sequence portion
gccgaggucuuccaacuggugg

SEQ ID NO: 2948 - RNA, 22 nt, Artificial Sequence
  SARM1 targeting guide sequence portion
gccgcaacagcaggucgaggcc

SEQ ID NO: 2949 - RNA, 22 nt, Artificial Sequence
  SARM1 targeting guide sequence portion
gccgccaucgaggcggauggcg

SEQ ID NO: 2950 - RNA, 22 nt, Artificial Sequence
  SARM1 targeting guide sequence portion
gccgcccgccugcuucagcgcg

SEQ ID NO: 2951 - RNA, 22 nt, Artificial Sequence
  SARM1 targeting guide sequence portion
gccgcgagguagcccagggucu

SEQ ID NO: 2952 - RNA, 22 nt, Artificial Sequence
  SARM1 targeting guide sequence portion
gccgcgcgccugcuggagcaga

SEQ ID NO: 2953 - RNA, 22 nt, Artificial Sequence
  SARM1 targeting guide sequence portion
gccggagcugcagcaggccuug

SEQ ID NO: 2954 - RNA, 22 nt, Artificial Sequence
  SARM1 targeting guide sequence portion
gccggaguuggagacgcgugug

SEQ ID NO: 2955 - RNA, 22 nt, Artificial Sequence
  SARM1 targeting guide sequence portion
gccggccuggccgaggucuucc

SEQ ID NO: 2956 - RNA, 22 nt, Artificial Sequence
  SARM1 targeting guide sequence portion
gccgggggcaggcaccgaggug

SEQ ID NO: 2957 - RNA, 22 nt, Artificial Sequence
  SARM1 targeting guide sequence portion
gccgugggcccgacauggcgaa

SEQ ID NO: 2958 - RNA, 22 nt, Artificial Sequence
  SARM1 targeting guide sequence portion
gccgugggccgcgagguagccc

SEQ ID NO: 2959 - RNA, 22 nt, Artificial Sequence
  SARM1 targeting guide sequence portion
gccgugggcgccggccuggccg

SEQ ID NO: 2960 - RNA, 22 nt, Artificial Sequence
  SARM1 targeting guide sequence portion
gccuacaagcugugucgcuucu

SEQ ID NO: 2961 - RNA, 22 nt, Artificial Sequence
  SARM1 targeting guide sequence portion
gccuccuccaccaguuggaaga

SEQ ID NO: 2962 - RNA, 22 nt, Artificial Sequence
  SARM1 targeting guide sequence portion
gccucgaccugcuguugcggcu

SEQ ID NO: 2963 - RNA, 22 nt, Artificial Sequence
  SARM1 targeting guide sequence portion
gccucgauggcggccucgaccu

SEQ ID NO: 2964 - RNA, 22 nt, Artificial Sequence
  SARM1 targeting guide sequence portion
gccugcacacgcgucuccaacu

SEQ ID NO: 2965 - RNA, 22 nt, Artificial Sequence
  SARM1 targeting guide sequence portion
gccugcagcagccgcaacagca

SEQ ID NO: 2966 - RNA, 22 nt, Artificial Sequence
  SARM1 targeting guide sequence portion
gccugcccccggcgacacuucg

SEQ ID NO: 2967 - RNA, 22 nt, Artificial Sequence
  SARM1 targeting guide sequence portion
gccugcugcagcuccggcagcg

SEQ ID NO: 2968 - RNA, 22 nt, Artificial Sequence
  SARM1 targeting guide sequence portion
gccugcuggagcagauccuggu

SEQ ID NO: 2969 - RNA, 22 nt, Artificial Sequence
  SARM1 targeting guide sequence portion
gccugcuucagcgcggacaagg

SEQ ID NO: 2970 - RNA, 22 nt, Artificial Sequence
  SARM1 targeting guide sequence portion
gccuggccgaggucuuccaacu

SEQ ID NO: 2971 - RNA, 22 nt, Artificial Sequence
  SARM1 targeting guide sequence portion
gccugggccagaugggggcggu

SEQ ID NO: 2972 - RNA, 22 nt, Artificial Sequence
  SARM1 targeting guide sequence portion
gccuuguccgcgcugaagcagg

SEQ ID NO: 2973 - RNA, 22 nt, Artificial Sequence
  SARM1 targeting guide sequence portion
gcgaagaagcgacacagcuugu

SEQ ID NO: 2974 - RNA, 22 nt, Artificial Sequence
  SARM1 targeting guide sequence portion
gcgaagugucgccgggggcagg

SEQ ID NO: 2975 - RNA, 22 nt, Artificial Sequence
  SARM1 targeting guide sequence portion
gcgacacagcuuguaggcggag

SEQ ID NO: 2976 - RNA, 22 nt, Artificial Sequence
  SARM1 targeting guide sequence portion
gcgacacuucgcggggcccgcg

SEQ ID NO: 2977 - RNA, 22 nt, Artificial Sequence
  SARM1 targeting guide sequence portion
gcgacgccauccgccucgaugg

SEQ ID NO: 2978 - RNA, 22 nt, Artificial Sequence
  SARM1 targeting guide sequence portion
gcgagguagcccagggucugug

SEQ ID NO: 2979 - RNA, 22 nt, Artificial Sequence
  SARM1 targeting guide sequence portion
gcgcccggccgugggcccgaca

SEQ ID NO: 2980 - RNA, 22 nt, Artificial Sequence
  SARM1 targeting guide sequence portion
gcgccgcccgccugcuucagcg

SEQ ID NO: 2981 - RNA, 22 nt, Artificial Sequence
  SARM1 targeting guide sequence portion
gcgccggaguuggagacgcgug

SEQ ID NO: 2982 - RNA, 22 nt, Artificial Sequence
  SARM1 targeting guide sequence portion
gcgccggccuggccgaggucuu

SEQ ID NO: 2983 - RNA, 22 nt, Artificial Sequence
  SARM1 targeting guide sequence portion
gcgccugcagcagccgcaacag

SEQ ID NO: 2984 - RNA, 22 nt, Artificial Sequence
  SARM1 targeting guide sequence portion
gcgccugcuggagcagauccug

SEQ ID NO: 2985 - RNA, 22 nt, Artificial Sequence
  SARM1 targeting guide sequence portion
gcgcgccgcccgccugcuucag

SEQ ID NO: 2986 - RNA, 22 nt, Artificial Sequence
  SARM1 targeting guide sequence portion
gcgcgccugcuggagcagaucc

SEQ ID NO: 2987 - RNA, 22 nt, Artificial Sequence
  SARM1 targeting guide sequence portion
gcgcgcgcuccagggcguccug

SEQ ID NO: 2988 - RNA, 22 nt, Artificial Sequence
  SARM1 targeting guide sequence portion
gcgcgcgcugccggagcugcag

SEQ ID NO: 2989 - RNA, 22 nt, Artificial Sequence
  SARM1 targeting guide sequence portion
gcgcgcggccugcacacgcguc

SEQ ID NO: 2990 - RNA, 22 nt, Artificial Sequence
  SARM1 targeting guide sequence portion
gcgcgcuccagggcguccugca

SEQ ID NO: 2991 - RNA, 22 nt, Artificial Sequence
  SARM1 targeting guide sequence portion
gcgcgcugccggagcugcagca

SEQ ID NO: 2992 - RNA, 22 nt, Artificial Sequence
  SARM1 targeting guide sequence portion
gcgcggacaaggccugcugcag

SEQ ID NO: 2993 - RNA, 22 nt, Artificial Sequence
  SARM1 targeting guide sequence portion
gcgcggccugcacacgcgucuc

SEQ ID NO: 2994 - RNA, 22 nt, Artificial Sequence
  SARM1 targeting guide sequence portion
gcgcuccagggcguccugcacc

SEQ ID NO: 2995 - RNA, 22 nt, Artificial Sequence
  SARM1 targeting guide sequence portion
gcgcugccggagcugcagcagg

SEQ ID NO: 2996 - RNA, 22 nt, Artificial Sequence
  SARM1 targeting guide sequence portion
gcggacaaggccugcugcagcu

SEQ ID NO: 2997 - RNA, 22 nt, Artificial Sequence
  SARM1 targeting guide sequence portion
gcggauggcgucgcacagaccc

SEQ ID NO: 2998 - RNA, 22 nt, Artificial Sequence
  SARM1 targeting guide sequence portion
gcggccucgaccugcuguugcg

SEQ ID NO: 2999 - RNA, 22 nt, Artificial Sequence
  SARM1 targeting guide sequence portion
gcggccugcacacgcgucucca

SEQ ID NO: 3000 - RNA, 22 nt, Artificial Sequence
  SARM1 targeting guide sequence portion
gcggcugcugcaggcgccggag

SEQ ID NO: 3001 - RNA, 22 nt, Artificial Sequence
  SARM1 targeting guide sequence portion
gcggcuggcggugccugggcca

SEQ ID NO: 3002 - RNA, 22 nt, Artificial Sequence
  SARM1 targeting guide sequence portion
gcggguggccgcgggccccgcg

SEQ ID NO: 3003 - RNA, 22 nt, Artificial Sequence
  SARM1 targeting guide sequence portion
gcggugccugggccagaugggg

SEQ ID NO: 3004 - RNA, 22 nt, Artificial Sequence
  SARM1 targeting guide sequence portion
gcguccugcaccucggugccug

SEQ ID NO: 3005 - RNA, 22 nt, Artificial Sequence
  SARM1 targeting guide sequence portion
gcgucgcacagacccugggcua

SEQ ID NO: 3006 - RNA, 22 nt, Artificial Sequence
  SARM1 targeting guide sequence portion
gcgucuccaacuccggcgccug

SEQ ID NO: 3007 - RNA, 22 nt, Artificial Sequence
  SARM1 targeting guide sequence portion
gcgugugcaggccgcgcgccug

SEQ ID NO: 3008 - RNA, 22 nt, Artificial Sequence
  SARM1 targeting guide sequence portion
gcucaccgguucucagccacca

SEQ ID NO: 3009 - RNA, 22 nt, Artificial Sequence
  SARM1 targeting guide sequence portion
gcuccagcaggcgcgcggccug

SEQ ID NO: 3010 - RNA, 22 nt, Artificial Sequence
  SARM1 targeting guide sequence portion
gcuccagggcguccugcaccuc

SEQ ID NO: 3011 - RNA, 22 nt, Artificial Sequence
  SARM1 targeting guide sequence portion
gcuccggcagcgcgcgcuccag

SEQ ID NO: 3012 - RNA, 22 nt, Artificial Sequence
  SARM1 targeting guide sequence portion
gcucggcgcccggccgugggcc

SEQ ID NO: 3013 - RNA, 22 nt, Artificial Sequence
  SARM1 targeting guide sequence portion
gcugcagcaggccuuguccgcg

SEQ ID NO: 3014 - RNA, 22 nt, Artificial Sequence
  SARM1 targeting guide sequence portion
gcugcagcuccggcagcgcgcg

SEQ ID NO: 3015 - RNA, 22 nt, Artificial Sequence
  SARM1 targeting guide sequence portion
gcugcaggcgccggaguuggag

SEQ ID NO: 3016 - RNA, 22 nt, Artificial Sequence
  SARM1 targeting guide sequence portion
gcugccggagcugcagcaggcc

SEQ ID NO: 3017 - RNA, 22 nt, Artificial Sequence
  SARM1 targeting guide sequence portion
gcugccggccgugggccgcgag

SEQ ID NO: 3018 - RNA, 22 nt, Artificial Sequence
  SARM1 targeting guide sequence portion
gcugcugcaggcgccggaguug

SEQ ID NO: 3019 - RNA, 22 nt, Artificial Sequence
  SARM1 targeting guide sequence portion
gcugcugccggccgugggccgc

SEQ ID NO: 3020 - RNA, 22 nt, Artificial Sequence
  SARM1 targeting guide sequence portion
gcugcuucucuccgccuacaag

SEQ ID NO: 3021 - RNA, 22 nt, Artificial Sequence
  SARM1 targeting guide sequence portion
gcuggagcagauccugguggcu

SEQ ID NO: 3022 - RNA, 22 nt, Artificial Sequence
  SARM1 targeting guide sequence portion
gcuggcggugccugggccagau

SEQ ID NO: 3023 - RNA, 22 nt, Artificial Sequence
  SARM1 targeting guide sequence portion
gcugugucgcuucuucgccaug

SEQ ID NO: 3024 - RNA, 22 nt, Artificial Sequence
  SARM1 targeting guide sequence portion
gcuguugcggcugcugcaggcg

SEQ ID NO: 3025 - RNA, 22 nt, Artificial Sequence
  SARM1 targeting guide sequence portion
gcuucagcgcggacaaggccug

SEQ ID NO: 3026 - RNA, 22 nt, Artificial Sequence
  SARM1 targeting guide sequence portion
gcuucucuccgccuacaagcug

SEQ ID NO: 3027 - RNA, 22 nt, Artificial Sequence
  SARM1 targeting guide sequence portion
gcuucuucgccaugucgggccc

SEQ ID NO: 3028 - RNA, 22 nt, Artificial Sequence
  SARM1 targeting guide sequence portion
gcuuguaggcggagagaagcag

SEQ ID NO: 3029 - RNA, 22 nt, Artificial Sequence
  SARM1 targeting guide sequence portion
ggaagaccucggccaggccggc

SEQ ID NO: 3030 - RNA, 22 nt, Artificial Sequence
  SARM1 targeting guide sequence portion
ggacaaggccugcugcagcucc

SEQ ID NO: 3031 - RNA, 22 nt, Artificial Sequence
  SARM1 targeting guide sequence portion
ggacgcccuggagcgcgcgcug

SEQ ID NO: 3032 - RNA, 22 nt, Artificial Sequence
  SARM1 targeting guide sequence portion
ggagacgcgugugcaggccgcg

SEQ ID NO: 3033 - RNA, 22 nt, Artificial Sequence
  SARM1 targeting guide sequence portion
ggagcagauccugguggcugag

SEQ ID NO: 3034 - RNA, 22 nt, Artificial Sequence
  SARM1 targeting guide sequence portion
ggagcgcgcgcugccggagcug

SEQ ID NO: 3035 - RNA, 22 nt, Artificial Sequence
  SARM1 targeting guide sequence portion
ggagcugcagcaggccuugucc

SEQ ID NO: 3036 - RNA, 22 nt, Artificial Sequence
  SARM1 targeting guide sequence portion
ggaguuggagacgcgugugcag

SEQ ID NO: 3037 - RNA, 22 nt, Artificial Sequence
  SARM1 targeting guide sequence portion
ggaucugcuccagcaggcgcgc

SEQ ID NO: 3038 - RNA, 22 nt, Artificial Sequence
  SARM1 targeting guide sequence portion
ggauggcgucgcacagacccug

SEQ ID NO: 3039 - RNA, 22 nt, Artificial Sequence
  SARM1 targeting guide sequence portion
ggcaccgaggugcaggacgccc

SEQ ID NO: 3040 - RNA, 22 nt, Artificial Sequence
  SARM1 targeting guide sequence portion
ggcagcgcgcgcuccagggcgu

SEQ ID NO: 3041 - RNA, 22 nt, Artificial Sequence
  SARM1 targeting guide sequence portion
ggcaggcaccgaggugcaggac

SEQ ID NO: 3042 - RNA, 22 nt, Artificial Sequence
  SARM1 targeting guide sequence portion
ggccagaugggggcgguggcac

SEQ ID NO: 3043 - RNA, 22 nt, Artificial Sequence
  SARM1 targeting guide sequence portion
ggccccgcgaagugucgccggg

SEQ ID NO: 3044 - RNA, 22 nt, Artificial Sequence
  SARM1 targeting guide sequence portion
ggcccgacauggcgaagaagcg

SEQ ID NO: 3045 - RNA, 22 nt, Artificial Sequence
  SARM1 targeting guide sequence portion
ggcccgcggccacccgcagccc

SEQ ID NO: 3046 - RNA, 22 nt, Artificial Sequence
  SARM1 targeting guide sequence portion
ggcccgugccaccgcccccauc

SEQ ID NO: 3047 - RNA, 22 nt, Artificial Sequence
  SARM1 targeting guide sequence portion
ggccgaggucuuccaacuggug

SEQ ID NO: 3048 - RNA, 22 nt, Artificial Sequence
  SARM1 targeting guide sequence portion
ggccgccaucgaggcggauggc

SEQ ID NO: 3049 - RNA, 22 nt, Artificial Sequence
  SARM1 targeting guide sequence portion
ggccgcgagguagcccaggguc

SEQ ID NO: 3050 - RNA, 22 nt, Artificial Sequence
  SARM1 targeting guide sequence portion
ggccgcgcgccugcuggagcag

SEQ ID NO: 3051 - RNA, 22 nt, Artificial Sequence
  SARM1 targeting guide sequence portion
ggccgugggcccgacauggcga

SEQ ID NO: 3052 - RNA, 22 nt, Artificial Sequence
  SARM1 targeting guide sequence portion
ggccgugggccgcgagguagcc

SEQ ID NO: 3053 - RNA, 22 nt, Artificial Sequence
  SARM1 targeting guide sequence portion
ggccuccuccaccaguuggaag

SEQ ID NO: 3054 - RNA, 22 nt, Artificial Sequence
  SARM1 targeting guide sequence portion
ggccucgaccugcuguugcggc

SEQ ID NO: 3055 - RNA, 22 nt, Artificial Sequence
  SARM1 targeting guide sequence portion
ggccugcacacgcgucuccaac

SEQ ID NO: 3056 - RNA, 22 nt, Artificial Sequence
  SARM1 targeting guide sequence portion
ggccugcugcagcuccggcagc

SEQ ID NO: 3057 - RNA, 22 nt, Artificial Sequence
  SARM1 targeting guide sequence portion
ggccuggccgaggucuuccaac

SEQ ID NO: 3058 - RNA, 22 nt, Artificial Sequence
  SARM1 targeting guide sequence portion
ggccuuguccgcgcugaagcag

SEQ ID NO: 3059 - RNA, 22 nt, Artificial Sequence
  SARM1 targeting guide sequence portion
ggcgaagaagcgacacagcuug

SEQ ID NO: 3060 - RNA, 22 nt, Artificial Sequence
  SARM1 targeting guide sequence portion
ggcgacacuucgcggggcccgc

SEQ ID NO: 3061 - RNA, 22 nt, Artificial Sequence
  SARM1 targeting guide sequence portion
ggcgccggaguuggagacgcgu

SEQ ID NO: 3062 - RNA, 22 nt, Artificial Sequence
  SARM1 targeting guide sequence portion
ggcgccggccuggccgaggucu

SEQ ID NO: 3063 - RNA, 22 nt, Artificial Sequence
  SARM1 targeting guide sequence portion
ggcgccugcagcagccgcaaca

SEQ ID NO: 3064 - RNA, 22 nt, Artificial Sequence
  SARM1 targeting guide sequence portion
ggcgcgcggccugcacacgcgu

SEQ ID NO: 3065 - RNA, 22 nt, Artificial Sequence
  SARM1 targeting guide sequence portion
ggcggauggcgucgcacagacc

SEQ ID NO: 3066 - RNA, 22 nt, Artificial Sequence
  SARM1 targeting guide sequence portion
ggcggccucgaccugcuguugc

SEQ ID NO: 3067 - RNA, 22 nt, Artificial Sequence
  SARM1 targeting guide sequence portion
ggcggugccugggccagauggg

SEQ ID NO: 3068 - RNA, 22 nt, Artificial Sequence
  SARM1 targeting guide sequence portion
ggcguccugcaccucggugccu

SEQ ID NO: 3069 - RNA, 22 nt, Artificial Sequence
  SARM1 targeting guide sequence portion
ggcgucgcacagacccugggcu

SEQ ID NO: 3070 - RNA, 22 nt, Artificial Sequence
  SARM1 targeting guide sequence portion
ggcugcugcaggcgccggaguu

SEQ ID NO: 3071 - RNA, 22 nt, Artificial Sequence
  SARM1 targeting guide sequence portion
ggcugcugccggccgugggccg

SEQ ID NO: 3072 - RNA, 22 nt, Artificial Sequence
  SARM1 targeting guide sequence portion
ggcuggcggugccugggccaga

SEQ ID NO: 3073 - RNA, 22 nt, Artificial Sequence
  SARM1 targeting guide sequence portion
gggcaggcaccgaggugcagga

SEQ ID NO: 3074 - RNA, 22 nt, Artificial Sequence
  SARM1 targeting guide sequence portion
gggccagaugggggcgguggca

SEQ ID NO: 3075 - RNA, 22 nt, Artificial Sequence
  SARM1 targeting guide sequence portion
gggccccgcgaagugucgccgg

SEQ ID NO: 3076 - RNA, 22 nt, Artificial Sequence
  SARM1 targeting guide sequence portion
gggcccgacauggcgaagaagc

SEQ ID NO: 3077 - RNA, 22 nt, Artificial Sequence
  SARM1 targeting guide sequence portion
gggcccgcggccacccgcagcc

SEQ ID NO: 3078 - RNA, 22 nt, Artificial Sequence
  SARM1 targeting guide sequence portion
gggcccgugccaccgcccccau

SEQ ID NO: 3079 - RNA, 22 nt, Artificial Sequence
  SARM1 targeting guide sequence portion
gggccgcgagguagcccagggu

SEQ ID NO: 3080 - RNA, 22 nt, Artificial Sequence
  SARM1 targeting guide sequence portion
gggcgccggccuggccgagguc

SEQ ID NO: 3081 - RNA, 22 nt, Artificial Sequence
  SARM1 targeting guide sequence portion
gggcgguggcacgggcccaugg

SEQ ID NO: 3082 - RNA, 22 nt, Artificial Sequence
  SARM1 targeting guide sequence portion
gggcguccugcaccucggugcc

SEQ ID NO: 3083 - RNA, 22 nt, Artificial Sequence
  SARM1 targeting guide sequence portion
ggggcaggcaccgaggugcagg

SEQ ID NO: 3084 - RNA, 22 nt, Artificial Sequence
  SARM1 targeting guide sequence portion
ggggcgguggcacgggcccaug

SEQ ID NO: 3085 - RNA, 22 nt, Artificial Sequence
  SARM1 targeting guide sequence portion
gggggcaggcaccgaggugcag

SEQ ID NO: 3086 - RNA, 22 nt, Artificial Sequence
  SARM1 targeting guide sequence portion
gggggcgguggcacgggcccau

SEQ ID NO: 3087 - RNA, 22 nt, Artificial Sequence
  SARM1 targeting guide sequence portion
gggucugugcgacgccauccgc

SEQ ID NO: 3088 - RNA, 22 nt, Artificial Sequence
  SARM1 targeting guide sequence portion
ggguggccgcgggccccgcgaa

SEQ ID NO: 3089 - RNA, 22 nt, Artificial Sequence
  SARM1 targeting guide sequence portion
gguagcccagggucugugcgac

SEQ ID NO: 3090 - RNA, 22 nt, Artificial Sequence
  SARM1 targeting guide sequence portion
gguccugacgcugcuucucucc

SEQ ID NO: 3091 - RNA, 22 nt, Artificial Sequence
  SARM1 targeting guide sequence portion
ggucgaggccgccaucgaggcg

SEQ ID NO: 3092 - RNA, 22 nt, Artificial Sequence
  SARM1 targeting guide sequence portion
ggucugugcgacgccauccgcc

SEQ ID NO: 3093 - RNA, 22 nt, Artificial Sequence
  SARM1 targeting guide sequence portion
ggucuuccaacugguggaggag

SEQ ID NO: 3094 - RNA, 22 nt, Artificial Sequence
  SARM1 targeting guide sequence portion
ggugcaggacgcccuggagcgc

SEQ ID NO: 3095 - RNA, 22 nt, Artificial Sequence
  SARM1 targeting guide sequence portion
ggugccugcccccggcgacacu

SEQ ID NO: 3096 - RNA, 22 nt, Artificial Sequence
  SARM1 targeting guide sequence portion
ggugccugggccagaugggggc

SEQ ID NO: 3097 - RNA, 22 nt, Artificial Sequence
  SARM1 targeting guide sequence portion
gguggccgcgggccccgcgaag

SEQ ID NO: 3098 - RNA, 22 nt, Artificial Sequence
  SARM1 targeting guide sequence portion
gguucucagccaccaggaucug

SEQ ID NO: 3099 - RNA, 22 nt, Artificial Sequence
  SARM1 targeting guide sequence portion
guagcccagggucugugcgacg

SEQ ID NO: 3100 - RNA, 22 nt, Artificial Sequence
  SARM1 targeting guide sequence portion
guaggcggagagaagcagcguc

SEQ ID NO: 3101 - RNA, 22 nt, Artificial Sequence
  SARM1 targeting guide sequence portion
guccgcgcugaagcaggcgggc

SEQ ID NO: 3102 - RNA, 22 nt, Artificial Sequence
  SARM1 targeting guide sequence portion
guccugacgcugcuucucuccg

SEQ ID NO: 3103 - RNA, 22 nt, Artificial Sequence
  SARM1 targeting guide sequence portion
guccugcaccucggugccugcc

SEQ ID NO: 3104 - RNA, 22 nt, Artificial Sequence
  SARM1 targeting guide sequence portion
gucgaggccgccaucgaggcgg

SEQ ID NO: 3105 - RNA, 22 nt, Artificial Sequence
  SARM1 targeting guide sequence portion
gucgcacagacccugggcuacc

SEQ ID NO: 3106 - RNA, 22 nt, Artificial Sequence
  SARM1 targeting guide sequence portion
gucgccgggggcaggcaccgag

SEQ ID NO: 3107 - RNA, 22 nt, Artificial Sequence
  SARM1 targeting guide sequence portion
gucgcuucuucgccaugucggg

SEQ ID NO: 3108 - RNA, 22 nt, Artificial Sequence
  SARM1 targeting guide sequence portion
gucuccaacuccggcgccugca

SEQ ID NO: 3109 - RNA, 22 nt, Artificial Sequence
  SARM1 targeting guide sequence portion
gucugugcgacgccauccgccu

SEQ ID NO: 3110 - RNA, 22 nt, Artificial Sequence
  SARM1 targeting guide sequence portion
gucuuccaacugguggaggagg

SEQ ID NO: 3111 - RNA, 22 nt, Artificial Sequence
  SARM1 targeting guide sequence portion
gugcaggacgcccuggagcgcg

SEQ ID NO: 3112 - RNA, 22 nt, Artificial Sequence
  SARM1 targeting guide sequence portion
gugcaggccgcgcgccugcugg

SEQ ID NO: 3113 - RNA, 22 nt, Artificial Sequence
  SARM1 targeting guide sequence portion
gugccaccgcccccaucuggcc

SEQ ID NO: 3114 - RNA, 22 nt, Artificial Sequence
  SARM1 targeting guide sequence portion
gugccugcccccggcgacacuu

SEQ ID NO: 3115 - RNA, 22 nt, Artificial Sequence
  SARM1 targeting guide sequence portion
gugccugggccagaugggggcg

SEQ ID NO: 3116 - RNA, 22 nt, Artificial Sequence
  SARM1 targeting guide sequence portion
gugcgacgccauccgccucgau

SEQ ID NO: 3117 - RNA, 22 nt, Artificial Sequence
  SARM1 targeting guide sequence portion
guggccgcgggccccgcgaagu

SEQ ID NO: 3118 - RNA, 22 nt, Artificial Sequence
  SARM1 targeting guide sequence portion
gugggcccgacauggcgaagaa

SEQ ID NO: 3119 - RNA, 22 nt, Artificial Sequence
  SARM1 targeting guide sequence portion
gugggccgcgagguagcccagg

SEQ ID NO: 3120 - RNA, 22 nt, Artificial Sequence
  SARM1 targeting guide sequence portion
gugggcgccggccuggccgagg

SEQ ID NO: 3121 - RNA, 22 nt, Artificial Sequence
  SARM1 targeting guide sequence portion
gugucgccgggggcaggcaccg

SEQ ID NO: 3122 - RNA, 22 nt, Artificial Sequence
  SARM1 targeting guide sequence portion
gugucgcuucuucgccaugucg

SEQ ID NO: 3123 - RNA, 22 nt, Artificial Sequence
  SARM1 targeting guide sequence portion
gugugcaggccgcgcgccugcu

SEQ ID NO: 3124 - RNA, 22 nt, Artificial Sequence
  SARM1 targeting guide sequence portion
guucucagccaccaggaucugc

SEQ ID NO: 3125 - RNA, 22 nt, Artificial Sequence
  SARM1 targeting guide sequence portion
guugcggcugcugcaggcgccg

SEQ ID NO: 3126 - RNA, 22 nt, Artificial Sequence
  SARM1 targeting guide sequence portion
guuggaagaccucggccaggcc

SEQ ID NO: 3127 - RNA, 22 nt, Artificial Sequence
  SARM1 targeting guide sequence portion
guuggagacgcgugugcaggcc

SEQ ID NO: 3128 - RNA, 22 nt, Artificial Sequence
  SARM1 targeting guide sequence portion
uacaagcugugucgcuucuucg

SEQ ID NO: 3129 - RNA, 22 nt, Artificial Sequence
  SARM1 targeting guide sequence portion
uagcccagggucugugcgacgc

SEQ ID NO: 3130 - RNA, 22 nt, Artificial Sequence
  SARM1 targeting guide sequence portion
uaggcggagagaagcagcguca

SEQ ID NO: 3131 - RNA, 22 nt, Artificial Sequence
  SARM1 targeting guide sequence portion
ucaccgguucucagccaccagg

SEQ ID NO: 3132 - RNA, 22 nt, Artificial Sequence
  SARM1 targeting guide sequence portion
ucagccaccaggaucugcucca

SEQ ID NO: 3133 - RNA, 22 nt, Artificial Sequence
  SARM1 targeting guide sequence portion
ucagcgcggacaaggccugcug

SEQ ID NO: 3134 - RNA, 22 nt, Artificial Sequence
  SARM1 targeting guide sequence portion
uccaacuccggcgccugcagca

SEQ ID NO: 3135 - RNA, 22 nt, Artificial Sequence
  SARM1 targeting guide sequence portion
uccaacugguggaggaggccug

SEQ ID NO: 3136 - RNA, 22 nt, Artificial Sequence
  SARM1 targeting guide sequence portion
uccaccaguuggaagaccucgg

SEQ ID NO: 3137 - RNA, 22 nt, Artificial Sequence
  SARM1 targeting guide sequence portion
uccagcaggcgcgcggccugca

SEQ ID NO: 3138 - RNA, 22 nt, Artificial Sequence
  SARM1 targeting guide sequence portion
uccagggcguccugcaccucgg

SEQ ID NO: 3139 - RNA, 22 nt, Artificial Sequence
  SARM1 targeting guide sequence portion
uccgccuacaagcugugucgcu

SEQ ID NO: 3140 - RNA, 22 nt, Artificial Sequence
  SARM1 targeting guide sequence portion
uccgccucgauggcggccucga

SEQ ID NO: 3141 - RNA, 22 nt, Artificial Sequence
  SARM1 targeting guide sequence portion
uccgcgcugaagcaggcgggcg

SEQ ID NO: 3142 - RNA, 22 nt, Artificial Sequence
  SARM1 targeting guide sequence portion
uccggcagcgcgcgcuccaggg

SEQ ID NO: 3143 - RNA, 22 nt, Artificial Sequence
  SARM1 targeting guide sequence portion
uccggcgccugcagcagccgca

SEQ ID NO: 3144 - RNA, 22 nt, Artificial Sequence
  SARM1 targeting guide sequence portion
uccuccaccaguuggaagaccu

SEQ ID NO: 3145 - RNA, 22 nt, Artificial Sequence
  SARM1 targeting guide sequence portion
uccugacgcugcuucucuccgc

SEQ ID NO: 3146 - RNA, 22 nt, Artificial Sequence
  SARM1 targeting guide sequence portion
uccugcaccucggugccugccc

SEQ ID NO: 3147 - RNA, 22 nt, Artificial Sequence
  SARM1 targeting guide sequence portion
ucgaccugcuguugcggcugcu

SEQ ID NO: 3148 - RNA, 22 nt, Artificial Sequence
  SARM1 targeting guide sequence portion
ucgaggccgccaucgaggcgga

SEQ ID NO: 3149 - RNA, 22 nt, Artificial Sequence
  SARM1 targeting guide sequence portion
ucgaggcggauggcgucgcaca

SEQ ID NO: 3150 - RNA, 22 nt, Artificial Sequence
  SARM1 targeting guide sequence portion
ucgauggcggccucgaccugcu

SEQ ID NO: 3151 - RNA, 22 nt, Artificial Sequence
  SARM1 targeting guide sequence portion
ucgcacagacccugggcuaccu

SEQ ID NO: 3152 - RNA, 22 nt, Artificial Sequence
  SARM1 targeting guide sequence portion
ucgccaugucgggcccacggcc

SEQ ID NO: 3153 - RNA, 22 nt, Artificial Sequence
  SARM1 targeting guide sequence portion
ucgccgggggcaggcaccgagg

SEQ ID NO: 3154 - RNA, 22 nt, Artificial Sequence
  SARM1 targeting guide sequence portion
ucgcuucuucgccaugucgggc

SEQ ID NO: 3155 - RNA, 22 nt, Artificial Sequence
  SARM1 targeting guide sequence portion
ucggcgcccggccgugggcccg

SEQ ID NO: 3156 - RNA, 22 nt, Artificial Sequence
  SARM1 targeting guide sequence portion
ucggugccugcccccggcgaca

SEQ ID NO: 3157 - RNA, 22 nt, Artificial Sequence
  SARM1 targeting guide sequence portion
ucucagccaccaggaucugcuc

SEQ ID NO: 3158 - RNA, 22 nt, Artificial Sequence
  SARM1 targeting guide sequence portion
ucuccaacuccggcgccugcag

SEQ ID NO: 3159 - RNA, 22 nt, Artificial Sequence
  SARM1 targeting guide sequence portion
ucuccgccuacaagcugugucg

SEQ ID NO: 3160 - RNA, 22 nt, Artificial Sequence
  SARM1 targeting guide sequence portion
ucucuccgccuacaagcugugu

SEQ ID NO: 3161 - RNA, 22 nt, Artificial Sequence
  SARM1 targeting guide sequence portion
ucugcuccagcaggcgcgcggc

SEQ ID NO: 3162 - RNA, 22 nt, Artificial Sequence
  SARM1 targeting guide sequence portion
ucuggcccaggcaccgccagcc

SEQ ID NO: 3163 - RNA, 22 nt, Artificial Sequence
  SARM1 targeting guide sequence portion
ucugugcgacgccauccgccuc

SEQ ID NO: 3164 - RNA, 22 nt, Artificial Sequence
  SARM1 targeting guide sequence portion
ucuuccaacugguggaggaggc

SEQ ID NO: 3165 - RNA, 22 nt, Artificial Sequence
  SARM1 targeting guide sequence portion
ucuucgccaugucgggcccacg

SEQ ID NO: 3166 - RNA, 22 nt, Artificial Sequence
  SARM1 targeting guide sequence portion
ugaagcaggcgggcggcgcgcg

SEQ ID NO: 3167 - RNA, 22 nt, Artificial Sequence
  SARM1 targeting guide sequence portion
ugacgcugcuucucuccgccua

SEQ ID NO: 3168 - RNA, 22 nt, Artificial Sequence
  SARM1 targeting guide sequence portion
ugcacacgcgucuccaacuccg

SEQ ID NO: 3169 - RNA, 22 nt, Artificial Sequence
  SARM1 targeting guide sequence portion
ugcaccucggugccugcccccg

SEQ ID NO: 3170 - RNA, 22 nt, Artificial Sequence
  SARM1 targeting guide sequence portion
ugcagcagccgcaacagcaggu

SEQ ID NO: 3171 - RNA, 22 nt, Artificial Sequence
  SARM1 targeting guide sequence portion
ugcagcaggccuuguccgcgcu

SEQ ID NO: 3172 - RNA, 22 nt, Artificial Sequence
  SARM1 targeting guide sequence portion
ugcagcuccggcagcgcgcgcu

SEQ ID NO: 3173 - RNA, 22 nt, Artificial Sequence
  SARM1 targeting guide sequence portion
ugcaggacgcccuggagcgcgc

SEQ ID NO: 3174 - RNA, 22 nt, Artificial Sequence
  SARM1 targeting guide sequence portion
ugcaggccgcgcgccugcugga

SEQ ID NO: 3175 - RNA, 22 nt, Artificial Sequence
  SARM1 targeting guide sequence portion
ugcaggcgccggaguuggagac

SEQ ID NO: 3176 - RNA, 22 nt, Artificial Sequence
  SARM1 targeting guide sequence portion
ugccaccgcccccaucuggccc

SEQ ID NO: 3177 - RNA, 22 nt, Artificial Sequence
  SARM1 targeting guide sequence portion
ugcccccggcgacacuucgcgg

SEQ ID NO: 3178 - RNA, 22 nt, Artificial Sequence
  SARM1 targeting guide sequence portion
ugccggagcugcagcaggccuu

SEQ ID NO: 3179 - RNA, 22 nt, Artificial Sequence
  SARM1 targeting guide sequence portion
ugccugcccccggcgacacuuc

SEQ ID NO: 3180 - RNA, 22 nt, Artificial Sequence
  SARM1 targeting guide sequence portion
ugccugggccagaugggggcgg

SEQ ID NO: 3181 - RNA, 22 nt, Artificial Sequence
  SARM1 targeting guide sequence portion
ugcgacgccauccgccucgaug

SEQ ID NO: 3182 - RNA, 22 nt, Artificial Sequence
  SARM1 targeting guide sequence portion
ugcggcugcugcaggcgccgga

SEQ ID NO: 3183 - RNA, 22 nt, Artificial Sequence
  SARM1 targeting guide sequence portion
ugcggguggccgcgggccccgc

SEQ ID NO: 3184 - RNA, 22 nt, Artificial Sequence
  SARM1 targeting guide sequence portion
ugcuccagcaggcgcgcggccu

SEQ ID NO: 3185 - RNA, 22 nt, Artificial Sequence
  SARM1 targeting guide sequence portion
ugcugcagcuccggcagcgcgc

SEQ ID NO: 3186 - RNA, 22 nt, Artificial Sequence
  SARM1 targeting guide sequence portion
ugcugcaggcgccggaguugga

SEQ ID NO: 3187 - RNA, 22 nt, Artificial Sequence
  SARM1 targeting guide sequence portion
ugcuggagcagauccugguggc

SEQ ID NO: 3188 - RNA, 22 nt, Artificial Sequence
  SARM1 targeting guide sequence portion
ugcuguugcggcugcugcaggc

SEQ ID NO: 3189 - RNA, 22 nt, Artificial Sequence
  SARM1 targeting guide sequence portion
ugcuucagcgcggacaaggccu

SEQ ID NO: 3190 - RNA, 22 nt, Artificial Sequence
  SARM1 targeting guide sequence portion
ugcuucucuccgccuacaagcu

SEQ ID NO: 3191 - RNA, 22 nt, Artificial Sequence
  SARM1 targeting guide sequence portion
uggaagaccucggccaggccgg

SEQ ID NO: 3192 - RNA, 22 nt, Artificial Sequence
  SARM1 targeting guide sequence portion
uggagacgcgugugcaggccgc

SEQ ID NO: 3193 - RNA, 22 nt, Artificial Sequence
  SARM1 targeting guide sequence portion
uggagcagauccugguggcuga

SEQ ID NO: 3194 - RNA, 22 nt, Artificial Sequence
  SARM1 targeting guide sequence portion
uggagcgcgcgcugccggagcu

SEQ ID NO: 3195 - RNA, 22 nt, Artificial Sequence
  SARM1 targeting guide sequence portion
uggcccaggcaccgccagccgc

SEQ ID NO: 3196 - RNA, 22 nt, Artificial Sequence
  SARM1 targeting guide sequence portion
uggccgaggucuuccaacuggu

SEQ ID NO: 3197 - RNA, 22 nt, Artificial Sequence
  SARM1 targeting guide sequence portion
uggccgcgggccccgcgaagug

SEQ ID NO: 3198 - RNA, 22 nt, Artificial Sequence
  SARM1 targeting guide sequence portion
uggcgaagaagcgacacagcuu

SEQ ID NO: 3199 - RNA, 22 nt, Artificial Sequence
  SARM1 targeting guide sequence portion
uggcggccucgaccugcuguug

SEQ ID NO: 3200 - RNA, 22 nt, Artificial Sequence
  SARM1 targeting guide sequence portion
uggcggugccugggccagaugg

SEQ ID NO: 3201 - RNA, 22 nt, Artificial Sequence
  SARM1 targeting guide sequence portion
uggcgucgcacagacccugggc

SEQ ID NO: 3202 - RNA, 22 nt, Artificial Sequence
  SARM1 targeting guide sequence portion
ugggccagaugggggcgguggc

SEQ ID NO: 3203 - RNA, 22 nt, Artificial Sequence
  SARM1 targeting guide sequence portion
ugggcccgacauggcgaagaag

SEQ ID NO: 3204 - RNA, 22 nt, Artificial Sequence
  SARM1 targeting guide sequence portion
ugggcccgugccaccgccccca

SEQ ID NO: 3205 - RNA, 22 nt, Artificial Sequence
  SARM1 targeting guide sequence portion
ugggccgcgagguagcccaggg

SEQ ID NO: 3206 - RNA, 22 nt, Artificial Sequence
  SARM1 targeting guide sequence portion
ugggcgccggccuggccgaggu

SEQ ID NO: 3207 - RNA, 22 nt, Artificial Sequence
  SARM1 targeting guide sequence portion
ugggggcgguggcacgggccca

SEQ ID NO: 3208 - RNA, 22 nt, Artificial Sequence
  SARM1 targeting guide sequence portion
ugguccugacgcugcuucucuc

SEQ ID NO: 3209 - RNA, 22 nt, Artificial Sequence
  SARM1 targeting guide sequence portion
uguaggcggagagaagcagcgu

SEQ ID NO: 3210 - RNA, 22 nt, Artificial Sequence
  SARM1 targeting guide sequence portion
uguccgcgcugaagcaggcggg

SEQ ID NO: 3211 - RNA, 22 nt, Artificial Sequence
  SARM1 targeting guide sequence portion
ugucgccgggggcaggcaccga

SEQ ID NO: 3212 - RNA, 22 nt, Artificial Sequence
  SARM1 targeting guide sequence portion
ugucgcuucuucgccaugucgg

SEQ ID NO: 3213 - RNA, 22 nt, Artificial Sequence
  SARM1 targeting guide sequence portion
ugugcaggccgcgcgccugcug

SEQ ID NO: 3214 - RNA, 22 nt, Artificial Sequence
  SARM1 targeting guide sequence portion
ugugcgacgccauccgccucga

SEQ ID NO: 3215 - RNA, 22 nt, Artificial Sequence
  SARM1 targeting guide sequence portion
ugugucgcuucuucgccauguc

SEQ ID NO: 3216 - RNA, 22 nt, Artificial Sequence
  SARM1 targeting guide sequence portion
uguugcggcugcugcaggcgcc

SEQ ID NO: 3217 - RNA, 22 nt, Artificial Sequence
  SARM1 targeting guide sequence portion
uucagcgcggacaaggccugcu

SEQ ID NO: 3218 - RNA, 22 nt, Artificial Sequence
  SARM1 targeting guide sequence portion
uuccaacugguggaggaggccu

SEQ ID NO: 3219 - RNA, 22 nt, Artificial Sequence
  SARM1 targeting guide sequence portion
uucgccaugucgggcccacggc

SEQ ID NO: 3220 - RNA, 22 nt, Artificial Sequence
  SARM1 targeting guide sequence portion
uucucagccaccaggaucugcu

SEQ ID NO: 3221 - RNA, 22 nt, Artificial Sequence
  SARM1 targeting guide sequence portion
uucucuccgccuacaagcugug

SEQ ID NO: 3222 - RNA, 22 nt, Artificial Sequence
  SARM1 targeting guide sequence portion
uucuucgccaugucgggcccac

SEQ ID NO: 3223 - RNA, 22 nt, Artificial Sequence
  SARM1 targeting guide sequence portion
uugcggcugcugcaggcgccgg

SEQ ID NO: 3224 - RNA, 22 nt, Artificial Sequence
  SARM1 targeting guide sequence portion
uuggaagaccucggccaggccg

SEQ ID NO: 3225 - RNA, 22 nt, Artificial Sequence
  SARM1 targeting guide sequence portion
uuggagacgcgugugcaggccg

SEQ ID NO: 3226 - RNA, 22 nt, Artificial Sequence
  SARM1 targeting guide sequence portion
uuguaggcggagagaagcagcg

SEQ ID NO: 3227 - RNA, 22 nt, Artificial Sequence
  SARM1 targeting guide sequence portion
uuguccgcgcugaagcaggcgg

SEQ ID NO: 3228 - RNA, 20 nt, Artificial Sequence
  SARM1 targeting guide sequence portion
aaagccccgaugcacugcgc

SEQ ID NO: 3229 - RNA, 20 nt, Artificial Sequence
  SARM1 targeting guide sequence portion
aacaaggagguggagcgcga

SEQ ID NO: 3230 - RNA, 20 nt, Artificial Sequence
  SARM1 targeting guide sequence portion
aacaccgcuacugcgaggca

SEQ ID NO: 3231 - RNA, 20 nt, Artificial Sequence
  SARM1 targeting guide sequence portion
aacaugugcuccaagaugcc

SEQ ID NO: 3232 - RNA, 20 nt, Artificial Sequence
  SARM1 targeting guide sequence portion
aacccguagagcuggcgcgg

SEQ ID NO: 3233 - RNA, 20 nt, Artificial Sequence
  SARM1 targeting guide sequence portion
aaccgcuuggaggcgcagug

SEQ ID NO: 3234 - RNA, 20 nt, Artificial Sequence
  SARM1 targeting guide sequence portion
aaccuggcgaaggaacgcga

SEQ ID NO: 3235 - RNA, 20 nt, Artificial Sequence
  SARM1 targeting guide sequence portion
aacgcgaacccguagagcug

SEQ ID NO: 3236 - RNA, 20 nt, Artificial Sequence
  SARM1 targeting guide sequence portion
aacggcacgaggcgcugcag

SEQ ID NO: 3237 - RNA, 20 nt, Artificial Sequence
  SARM1 targeting guide sequence portion
aacugcgcgcugcacggggg

SEQ ID NO: 3238 - RNA, 20 nt, Artificial Sequence
  SARM1 targeting guide sequence portion
aagagccacucggcugcgcg

SEQ ID NO: 3239 - RNA, 20 nt, Artificial Sequence
  SARM1 targeting guide sequence portion
aagagccugcaaggcaagac

SEQ ID NO: 3240 - RNA, 20 nt, Artificial Sequence
  SARM1 targeting guide sequence portion
aagaugccugccacgcuccg

SEQ ID NO: 3241 - RNA, 20 nt, Artificial Sequence
  SARM1 targeting guide sequence portion
aagcagcucguccuccuugg

SEQ ID NO: 3242 - RNA, 20 nt, Artificial Sequence
  SARM1 targeting guide sequence portion
aagcauucggaggagacaug

SEQ ID NO: 3243 - RNA, 20 nt, Artificial Sequence
  SARM1 targeting guide sequence portion
aagccagggccgcgggcccg

SEQ ID NO: 3244 - RNA, 20 nt, Artificial Sequence
  SARM1 targeting guide sequence portion
aagccccgaugcacugcgcc

SEQ ID NO: 3245 - RNA, 20 nt, Artificial Sequence
  SARM1 targeting guide sequence portion
aagcgcgcagccgaguggcu

SEQ ID NO: 3246 - RNA, 20 nt, Artificial Sequence
  SARM1 targeting guide sequence portion
aagcggccaggguccagcga

SEQ ID NO: 3247 - RNA, 20 nt, Artificial Sequence
  SARM1 targeting guide sequence portion
aagcggcuccacgagcgcca

SEQ ID NO: 3248 - RNA, 20 nt, Artificial Sequence
  SARM1 targeting guide sequence portion
aagcgguuagagucgagcaa

SEQ ID NO: 3249 - RNA, 20 nt, Artificial Sequence
  SARM1 targeting guide sequence portion
aaggaacgcgaacccguaga

SEQ ID NO: 3250 - RNA, 20 nt, Artificial Sequence
  SARM1 targeting guide sequence portion
aaggaggacgagcugcuucg

SEQ ID NO: 3251 - RNA, 20 nt, Artificial Sequence
  SARM1 targeting guide sequence portion
aaggagguggagcgcgaggu

SEQ ID NO: 3252 - RNA, 20 nt, Artificial Sequence
  SARM1 targeting guide sequence portion
aaggcgagcgggaagagcca

SEQ ID NO: 3253 - RNA, 20 nt, Artificial Sequence
  SARM1 targeting guide sequence portion
aauacagcaccgcguccagg

SEQ ID NO: 3254 - RNA, 20 nt, Artificial Sequence
  SARM1 targeting guide sequence portion
aaugcgcgccacgcggucuc

SEQ ID NO: 3255 - RNA, 20 nt, Artificial Sequence
  SARM1 targeting guide sequence portion
aaugcuugaacaugugcucc

SEQ ID NO: 3256 - RNA, 20 nt, Artificial Sequence
  SARM1 targeting guide sequence portion
acaagccagggccgcgggcc

SEQ ID NO: 3257 - RNA, 20 nt, Artificial Sequence
  SARM1 targeting guide sequence portion
acaagcggcuccacgagcgc

SEQ ID NO: 3258 - RNA, 20 nt, Artificial Sequence
  SARM1 targeting guide sequence portion
acaaggagguggagcgcgag

SEQ ID NO: 3259 - RNA, 20 nt, Artificial Sequence
  SARM1 targeting guide sequence portion
acacaagccagggccgcggg

SEQ ID NO: 3260 - RNA, 20 nt, Artificial Sequence
  SARM1 targeting guide sequence portion
acaccgcuacugcgaggcag

SEQ ID NO: 3261 - RNA, 20 nt, Artificial Sequence
  SARM1 targeting guide sequence portion
acagcaccgcguccaggccg

SEQ ID NO: 3262 - RNA, 20 nt, Artificial Sequence
  SARM1 targeting guide sequence portion
acagcgggcgaagcggccag

SEQ ID NO: 3263 - RNA, 20 nt, Artificial Sequence
  SARM1 targeting guide sequence portion
acaugccagaggcugguggc

SEQ ID NO: 3264 - RNA, 20 nt, Artificial Sequence
  SARM1 targeting guide sequence portion
acaugugcuccaagaugccu

SEQ ID NO: 3265 - RNA, 20 nt, Artificial Sequence
  SARM1 targeting guide sequence portion
acauguucaagcauucggag

SEQ ID NO: 3266 - RNA, 20 nt, Artificial Sequence
  SARM1 targeting guide sequence portion
accaauacagcaccgcgucc

SEQ ID NO: 3267 - RNA, 20 nt, Artificial Sequence
  SARM1 targeting guide sequence portion
accagacagcgggcgaagcg

SEQ ID NO: 3268 - RNA, 20 nt, Artificial Sequence
  SARM1 targeting guide sequence portion
accagccucuggcaugucuc

SEQ ID NO: 3269 - RNA, 20 nt, Artificial Sequence
  SARM1 targeting guide sequence portion
accaugcgucgcugcaccgc

SEQ ID NO: 3270 - RNA, 20 nt, Artificial Sequence
  SARM1 targeting guide sequence portion
acccaccuuggucuugccuu

SEQ ID NO: 3271 - RNA, 20 nt, Artificial Sequence
  SARM1 targeting guide sequence portion
accccgcgcugcugcgccac

SEQ ID NO: 3272 - RNA, 20 nt, Artificial Sequence
  SARM1 targeting guide sequence portion
acccguagagcuggcgcgga

SEQ ID NO: 3273 - RNA, 20 nt, Artificial Sequence
  SARM1 targeting guide sequence portion
acccuggccgcuucgcccgc

SEQ ID NO: 3274 - RNA, 20 nt, Artificial Sequence
  SARM1 targeting guide sequence portion
accgccuggcccccgugcag

SEQ ID NO: 3275 - RNA, 20 nt, Artificial Sequence
  SARM1 targeting guide sequence portion
accgcguccaggccgccggc

SEQ ID NO: 3276 - RNA, 20 nt, Artificial Sequence
  SARM1 targeting guide sequence portion
accgcguggcgcgcauuggg

SEQ ID NO: 3277 - RNA, 20 nt, Artificial Sequence
  SARM1 targeting guide sequence portion
accgcuacugcgaggcaggc

SEQ ID NO: 3278 - RNA, 20 nt, Artificial Sequence
  SARM1 targeting guide sequence portion
accgcuuggaggcgcagugc

SEQ ID NO: 3279 - RNA, 20 nt, Artificial Sequence
  SARM1 targeting guide sequence portion
accuccuuguuagucgccaa

SEQ ID NO: 3280 - RNA, 20 nt, Artificial Sequence
  SARM1 targeting guide sequence portion
accucgcgcuccaccuccuu

SEQ ID NO: 3281 - RNA, 20 nt, Artificial Sequence
  SARM1 targeting guide sequence portion
accucugcgccgaggcugcc

SEQ ID NO: 3282 - RNA, 20 nt, Artificial Sequence
  SARM1 targeting guide sequence portion
accugcagcgccucgugccg

SEQ ID NO: 3283 - RNA, 20 nt, Artificial Sequence
  SARM1 targeting guide sequence portion
accuggcgaaggaacgcgaa

SEQ ID NO: 3284 - RNA, 20 nt, Artificial Sequence
  SARM1 targeting guide sequence portion
accuuggucuugccuugcag

SEQ ID NO: 3285 - RNA, 20 nt, Artificial Sequence
  SARM1 targeting guide sequence portion
acgaccugcagcgccucgug

SEQ ID NO: 3286 - RNA, 20 nt, Artificial Sequence
  SARM1 targeting guide sequence portion
acgagcgccagcgugcccga

SEQ ID NO: 3287 - RNA, 20 nt, Artificial Sequence
  SARM1 targeting guide sequence portion
acgagcugcuucggcugcac

SEQ ID NO: 3288 - RNA, 20 nt, Artificial Sequence
  SARM1 targeting guide sequence portion
acgaggcgcugcaggucguc

SEQ ID NO: 3289 - RNA, 20 nt, Artificial Sequence
  SARM1 targeting guide sequence portion
acgcaugguagagaagcgcg

SEQ ID NO: 3290 - RNA, 20 nt, Artificial Sequence
  SARM1 targeting guide sequence portion
acgccagcgacacaagccag

SEQ ID NO: 3291 - RNA, 20 nt, Artificial Sequence
  SARM1 targeting guide sequence portion
acgcccagcccaaugcgcgc

SEQ ID NO: 3292 - RNA, 20 nt, Artificial Sequence
  SARM1 targeting guide sequence portion
acgccugccucgcaguagcg

SEQ ID NO: 3293 - RNA, 20 nt, Artificial Sequence
  SARM1 targeting guide sequence portion
acgcgaacccguagagcugg

SEQ ID NO: 3294 - RNA, 20 nt, Artificial Sequence
  SARM1 targeting guide sequence portion
acgcggugcuguauuggugc

SEQ ID NO: 3295 - RNA, 20 nt, Artificial Sequence
  SARM1 targeting guide sequence portion
acgcuccgcgccagcucuac

SEQ ID NO: 3296 - RNA, 20 nt, Artificial Sequence
  SARM1 targeting guide sequence portion
acgcuggcgcucguggagcc

SEQ ID NO: 3297 - RNA, 20 nt, Artificial Sequence
  SARM1 targeting guide sequence portion
acggaccccgcgcugcugcg

SEQ ID NO: 3298 - RNA, 20 nt, Artificial Sequence
  SARM1 targeting guide sequence portion
acggcacgaggcgcugcagg

SEQ ID NO: 3299 - RNA, 20 nt, Artificial Sequence
  SARM1 targeting guide sequence portion
acgggggccaggcggugcag

SEQ ID NO: 3300 - RNA, 20 nt, Artificial Sequence
  SARM1 targeting guide sequence portion
acggguucgcguuccuucgc

SEQ ID NO: 3301 - RNA, 20 nt, Artificial Sequence
  SARM1 targeting guide sequence portion
acuaacaaggagguggagcg

SEQ ID NO: 3302 - RNA, 20 nt, Artificial Sequence
  SARM1 targeting guide sequence portion
acucggcugcgcgcuucucu

SEQ ID NO: 3303 - RNA, 20 nt, Artificial Sequence
  SARM1 targeting guide sequence portion
acucuaaccgcuuggaggcg

SEQ ID NO: 3304 - RNA, 20 nt, Artificial Sequence
  SARM1 targeting guide sequence portion
acugcgaggcaggcgugcag

SEQ ID NO: 3305 - RNA, 20 nt, Artificial Sequence
  SARM1 targeting guide sequence portion
acugcgccuccaagcgguua

SEQ ID NO: 3306 - RNA, 20 nt, Artificial Sequence
  SARM1 targeting guide sequence portion
acugcgcgcugcacgggggc

SEQ ID NO: 3307 - RNA, 20 nt, Artificial Sequence
  SARM1 targeting guide sequence portion
acugcgcgcuggcgcugggc

SEQ ID NO: 3308 - RNA, 20 nt, Artificial Sequence
  SARM1 targeting guide sequence portion
agaaagccccgaugcacugc

SEQ ID NO: 3309 - RNA, 20 nt, Artificial Sequence
  SARM1 targeting guide sequence portion
agaagcgcgcagccgagugg

SEQ ID NO: 3310 - RNA, 20 nt, Artificial Sequence
  SARM1 targeting guide sequence portion
agaaggcgagcgggaagagc

SEQ ID NO: 3311 - RNA, 20 nt, Artificial Sequence
  SARM1 targeting guide sequence portion
agacagcgggcgaagcggcc

SEQ ID NO: 3312 - RNA, 20 nt, Artificial Sequence
  SARM1 targeting guide sequence portion
agacaugccagaggcuggug

SEQ ID NO: 3313 - RNA, 20 nt, Artificial Sequence
  SARM1 targeting guide sequence portion
agaccgcguggcgcgcauug

SEQ ID NO: 3314 - RNA, 20 nt, Artificial Sequence
  SARM1 targeting guide sequence portion
agagaagcgcgcagccgagu

SEQ ID NO: 3315 - RNA, 20 nt, Artificial Sequence
  SARM1 targeting guide sequence portion
agagaccgcguggcgcgcau

SEQ ID NO: 3316 - RNA, 20 nt, Artificial Sequence
  SARM1 targeting guide sequence portion
agagccacucggcugcgcgc

SEQ ID NO: 3317 - RNA, 20 nt, Artificial Sequence
  SARM1 targeting guide sequence portion
agagccugcaaggcaagacc

SEQ ID NO: 3318 - RNA, 20 nt, Artificial Sequence
  SARM1 targeting guide sequence portion
agagcuggcgcggagcgugg

SEQ ID NO: 3319 - RNA, 20 nt, Artificial Sequence
  SARM1 targeting guide sequence portion
agaggcugguggcggccggc

SEQ ID NO: 3320 - RNA, 20 nt, Artificial Sequence
  SARM1 targeting guide sequence portion
agagguagaaagccccgaug

SEQ ID NO: 3321 - RNA, 20 nt, Artificial Sequence
  SARM1 targeting guide sequence portion
agagucgagcaacggcacga

SEQ ID NO: 3322 - RNA, 20 nt, Artificial Sequence
  SARM1 targeting guide sequence portion
agaugccugccacgcuccgc

SEQ ID NO: 3323 - RNA, 20 nt, Artificial Sequence
  SARM1 targeting guide sequence portion
agcaacggcacgaggcgcug

SEQ ID NO: 3324 - RNA, 20 nt, Artificial Sequence
  SARM1 targeting guide sequence portion
agcacauguucaagcauucg

SEQ ID NO: 3325 - RNA, 20 nt, Artificial Sequence
  SARM1 targeting guide sequence portion
agcaccgcguccaggccgcc

SEQ ID NO: 3326 - RNA, 20 nt, Artificial Sequence
  SARM1 targeting guide sequence portion
agcagcgcgggguccgugcg

SEQ ID NO: 3327 - RNA, 20 nt, Artificial Sequence
  SARM1 targeting guide sequence portion
agcagcucguccuccuugga

SEQ ID NO: 3328 - RNA, 20 nt, Artificial Sequence
  SARM1 targeting guide sequence portion
agcauucggaggagacaugc

SEQ ID NO: 3329 - RNA, 20 nt, Artificial Sequence
  SARM1 targeting guide sequence portion
agccacucggcugcgcgcuu

SEQ ID NO: 3330 - RNA, 20 nt, Artificial Sequence
  SARM1 targeting guide sequence portion
agccagggccgcgggcccga

SEQ ID NO: 3331 - RNA, 20 nt, Artificial Sequence
  SARM1 targeting guide sequence portion
agcccaaugcgcgccacgcg

SEQ ID NO: 3332 - RNA, 20 nt, Artificial Sequence
  SARM1 targeting guide sequence portion
agccccgaugcacugcgccu

SEQ ID NO: 3333 - RNA, 20 nt, Artificial Sequence
  SARM1 targeting guide sequence portion
agccgaagcagcucguccuc

SEQ ID NO: 3334 - RNA, 20 nt, Artificial Sequence
  SARM1 targeting guide sequence portion
agccgaguggcucuucccgc

SEQ ID NO: 3335 - RNA, 20 nt, Artificial Sequence
  SARM1 targeting guide sequence portion
agccgcuuguggccucgcug

SEQ ID NO: 3336 - RNA, 20 nt, Artificial Sequence
  SARM1 targeting guide sequence portion
agccucggcgcagagguaga

SEQ ID NO: 3337 - RNA, 20 nt, Artificial Sequence
  SARM1 targeting guide sequence portion
agccucuggcaugucuccuc

SEQ ID NO: 3338 - RNA, 20 nt, Artificial Sequence
  SARM1 targeting guide sequence portion
agccugcaaggcaagaccaa

SEQ ID NO: 3339 - RNA, 20 nt, Artificial Sequence
  SARM1 targeting guide sequence portion
agcgacacaagccagggccg

SEQ ID NO: 3340 - RNA, 20 nt, Artificial Sequence
  SARM1 targeting guide sequence portion
agcgacgcaugguagagaag

SEQ ID NO: 3341 - RNA, 20 nt, Artificial Sequence
  SARM1 targeting guide sequence portion
agcgaggccacaagcggcuc

SEQ ID NO: 3342 - RNA, 20 nt, Artificial Sequence
  SARM1 targeting guide sequence portion
agcgccagcgcgcaguggcg

SEQ ID NO: 3343 - RNA, 20 nt, Artificial Sequence
  SARM1 targeting guide sequence portion
agcgccagcgugcccgagcg

SEQ ID NO: 3344 - RNA, 20 nt, Artificial Sequence
  SARM1 targeting guide sequence portion
agcgccucgugccguugcuc

SEQ ID NO: 3345 - RNA, 20 nt, Artificial Sequence
  SARM1 targeting guide sequence portion
agcgcgagguggagcgcucg

SEQ ID NO: 3346 - RNA, 20 nt, Artificial Sequence
  SARM1 targeting guide sequence portion
agcgcgcagccgaguggcuc

SEQ ID NO: 3347 - RNA, 20 nt, Artificial Sequence
  SARM1 targeting guide sequence portion
agcgcgcaguggcgcagcag

SEQ ID NO: 3348 - RNA, 20 nt, Artificial Sequence
  SARM1 targeting guide sequence portion
agcgcgcaguugcccagcgc

SEQ ID NO: 3349 - RNA, 20 nt, Artificial Sequence
  SARM1 targeting guide sequence portion
agcgcgggguccgugcggcg

SEQ ID NO: 3350 - RNA, 20 nt, Artificial Sequence
  SARM1 targeting guide sequence portion
agcgcuccaccucgcgcucc

SEQ ID NO: 3351 - RNA, 20 nt, Artificial Sequence
  SARM1 targeting guide sequence portion
agcgcucgggcacgcuggcg

SEQ ID NO: 3352 - RNA, 20 nt, Artificial Sequence
  SARM1 targeting guide sequence portion
agcggccaggguccagcgag

SEQ ID NO: 3353 - RNA, 20 nt, Artificial Sequence
  SARM1 targeting guide sequence portion
agcggcuccacgagcgccag

SEQ ID NO: 3354 - RNA, 20 nt, Artificial Sequence
  SARM1 targeting guide sequence portion
agcgggaagagccacucggc

SEQ ID NO: 3355 - RNA, 20 nt, Artificial Sequence
  SARM1 targeting guide sequence portion
agcgggcgaagcggccaggg

SEQ ID NO: 3356 - RNA, 20 nt, Artificial Sequence
  SARM1 targeting guide sequence portion
agcgguguuggcgacuaaca

SEQ ID NO: 3357 - RNA, 20 nt, Artificial Sequence
  SARM1 targeting guide sequence portion
agcgguuagagucgagcaac

SEQ ID NO: 3358 - RNA, 20 nt, Artificial Sequence
  SARM1 targeting guide sequence portion
agcgugcccgagcgcuccac

SEQ ID NO: 3359 - RNA, 20 nt, Artificial Sequence
  SARM1 targeting guide sequence portion
agcguggcaggcaucuugga

SEQ ID NO: 3360 - RNA, 20 nt, Artificial Sequence
  SARM1 targeting guide sequence portion
agcucguccuccuuggagaa

SEQ ID NO: 3361 - RNA, 20 nt, Artificial Sequence
  SARM1 targeting guide sequence portion
agcucuacggguucgcguuc

SEQ ID NO: 3362 - RNA, 20 nt, Artificial Sequence
  SARM1 targeting guide sequence portion
agcugcuucggcugcacgcc

SEQ ID NO: 3363 - RNA, 20 nt, Artificial Sequence
  SARM1 targeting guide sequence portion
agcuggcgcggagcguggca

SEQ ID NO: 3364 - RNA, 20 nt, Artificial Sequence
  SARM1 targeting guide sequence portion
aggaacgcgaacccguagag

SEQ ID NO: 3365 - RNA, 20 nt, Artificial Sequence
  SARM1 targeting guide sequence portion
aggacgagcugcuucggcug

SEQ ID NO: 3366 - RNA, 20 nt, Artificial Sequence
  SARM1 targeting guide sequence portion
aggagacaugccagaggcug

SEQ ID NO: 3367 - RNA, 20 nt, Artificial Sequence
  SARM1 targeting guide sequence portion
aggaggacgagcugcuucgg

SEQ ID NO: 3368 - RNA, 20 nt, Artificial Sequence
  SARM1 targeting guide sequence portion
aggagguggagcgcgaggug

SEQ ID NO: 3369 - RNA, 20 nt, Artificial Sequence
  SARM1 targeting guide sequence portion
aggaucacgcccagcccaau

SEQ ID NO: 3370 - RNA, 20 nt, Artificial Sequence
  SARM1 targeting guide sequence portion
aggcaggcgugcagccgaag

SEQ ID NO: 3371 - RNA, 20 nt, Artificial Sequence
  SARM1 targeting guide sequence portion
aggcaucuuggagcacaugu

SEQ ID NO: 3372 - RNA, 20 nt, Artificial Sequence
  SARM1 targeting guide sequence portion
aggccacaagcggcuccacg

SEQ ID NO: 3373 - RNA, 20 nt, Artificial Sequence
  SARM1 targeting guide sequence portion
aggccgccggccgccaccag

SEQ ID NO: 3374 - RNA, 20 nt, Artificial Sequence
  SARM1 targeting guide sequence portion
aggcgagcgggaagagccac

SEQ ID NO: 3375 - RNA, 20 nt, Artificial Sequence
  SARM1 targeting guide sequence portion
aggcgcagugcaucggggcu

SEQ ID NO: 3376 - RNA, 20 nt, Artificial Sequence
  SARM1 targeting guide sequence portion
aggcgcugcaggucgucggg

SEQ ID NO: 3377 - RNA, 20 nt, Artificial Sequence
  SARM1 targeting guide sequence portion
aggcggugcagcgacgcaug

SEQ ID NO: 3378 - RNA, 20 nt, Artificial Sequence
  SARM1 targeting guide sequence portion
aggcgugcagccgaagcagc

SEQ ID NO: 3379 - RNA, 20 nt, Artificial Sequence
  SARM1 targeting guide sequence portion
aggcucuugauggcagccuc

SEQ ID NO: 3380 - RNA, 20 nt, Artificial Sequence
  SARM1 targeting guide sequence portion
aggcugccaucaagagccug

SEQ ID NO: 3381 - RNA, 20 nt, Artificial Sequence
  SARM1 targeting guide sequence portion
aggcugguggcggccggcgg

SEQ ID NO: 3382 - RNA, 20 nt, Artificial Sequence
  SARM1 targeting guide sequence portion
agggccgcgggcccgacgac

SEQ ID NO: 3383 - RNA, 20 nt, Artificial Sequence
  SARM1 targeting guide sequence portion
aggguccagcgaggccacaa

SEQ ID NO: 3384 - RNA, 20 nt, Artificial Sequence
  SARM1 targeting guide sequence portion
agguagaaagccccgaugca

SEQ ID NO: 3385 - RNA, 20 nt, Artificial Sequence
  SARM1 targeting guide sequence portion
aggucgucgggcccgcggcc

SEQ ID NO: 3386 - RNA, 20 nt, Artificial Sequence
  SARM1 targeting guide sequence portion
agguggagcgcgagguggag

SEQ ID NO: 3387 - RNA, 20 nt, Artificial Sequence
  SARM1 targeting guide sequence portion
agguggagcgcucgggcacg

SEQ ID NO: 3388 - RNA, 20 nt, Artificial Sequence
  SARM1 targeting guide sequence portion
agguucaggaucacgcccag

SEQ ID NO: 3389 - RNA, 20 nt, Artificial Sequence
  SARM1 targeting guide sequence portion
aguagcgguguuggcgacua

SEQ ID NO: 3390 - RNA, 20 nt, Artificial Sequence
  SARM1 targeting guide sequence portion
agucgagcaacggcacgagg

SEQ ID NO: 3391 - RNA, 20 nt, Artificial Sequence
  SARM1 targeting guide sequence portion
agucgccaacaccgcuacug

SEQ ID NO: 3392 - RNA, 20 nt, Artificial Sequence
  SARM1 targeting guide sequence portion
agugcaucggggcuuucuac

SEQ ID NO: 3393 - RNA, 20 nt, Artificial Sequence
  SARM1 targeting guide sequence portion
aguggcgcagcagcgcgggg

SEQ ID NO: 3394 - RNA, 20 nt, Artificial Sequence
  SARM1 targeting guide sequence portion
aguggcucuucccgcucgcc

SEQ ID NO: 3395 - RNA, 20 nt, Artificial Sequence
  SARM1 targeting guide sequence portion
aguugcccagcgccagcgcg

SEQ ID NO: 3396 - RNA, 20 nt, Artificial Sequence
  SARM1 targeting guide sequence portion
auacagcaccgcguccaggc

SEQ ID NO: 3397 - RNA, 20 nt, Artificial Sequence
  SARM1 targeting guide sequence portion
aucaagagccugcaaggcaa

SEQ ID NO: 3398 - RNA, 20 nt, Artificial Sequence
  SARM1 targeting guide sequence portion
aucacgcccagcccaaugcg

SEQ ID NO: 3399 - RNA, 20 nt, Artificial Sequence
  SARM1 targeting guide sequence portion
auccugaaccuggcgaagga

SEQ ID NO: 3400 - RNA, 20 nt, Artificial Sequence
  SARM1 targeting guide sequence portion
aucggggcuuucuaccucug

SEQ ID NO: 3401 - RNA, 20 nt, Artificial Sequence
  SARM1 targeting guide sequence portion
aucuuggagcacauguucaa

SEQ ID NO: 3402 - RNA, 20 nt, Artificial Sequence
  SARM1 targeting guide sequence portion
augcacugcgccuccaagcg

SEQ ID NO: 3403 - RNA, 20 nt, Artificial Sequence
  SARM1 targeting guide sequence portion
augccagaggcugguggcgg

SEQ ID NO: 3404 - RNA, 20 nt, Artificial Sequence
  SARM1 targeting guide sequence portion
augccugccacgcuccgcgc

SEQ ID NO: 3405 - RNA, 20 nt, Artificial Sequence
  SARM1 targeting guide sequence portion
augcgucgcugcaccgccug

SEQ ID NO: 3406 - RNA, 20 nt, Artificial Sequence
  SARM1 targeting guide sequence portion
augcuugaacaugugcucca

SEQ ID NO: 3407 - RNA, 20 nt, Artificial Sequence
  SARM1 targeting guide sequence portion
auggcagccucggcgcagag

SEQ ID NO: 3408 - RNA, 20 nt, Artificial Sequence
  SARM1 targeting guide sequence portion
augguagagaagcgcgcagc

SEQ ID NO: 3409 - RNA, 20 nt, Artificial Sequence
  SARM1 targeting guide sequence portion
augucuccuccgaaugcuug

SEQ ID NO: 3410 - RNA, 20 nt, Artificial Sequence
  SARM1 targeting guide sequence portion
augugcuccaagaugccugc

SEQ ID NO: 3411 - RNA, 20 nt, Artificial Sequence
  SARM1 targeting guide sequence portion
auguucaagcauucggagga

SEQ ID NO: 3412 - RNA, 20 nt, Artificial Sequence
  SARM1 targeting guide sequence portion
auucggaggagacaugccag

SEQ ID NO: 3413 - RNA, 20 nt, Artificial Sequence
  SARM1 targeting guide sequence portion
auugggcugggcgugauccu

SEQ ID NO: 3414 - RNA, 20 nt, Artificial Sequence
  SARM1 targeting guide sequence portion
auuggugccgccgcacggac

SEQ ID NO: 3415 - RNA, 20 nt, Artificial Sequence
  SARM1 targeting guide sequence portion
caacaccgcuacugcgaggc

SEQ ID NO: 3416 - RNA, 20 nt, Artificial Sequence
  SARM1 targeting guide sequence portion
caacggcacgaggcgcugca

SEQ ID NO: 3417 - RNA, 20 nt, Artificial Sequence
  SARM1 targeting guide sequence portion
caacugcgcgcugcacgggg

SEQ ID NO: 3418 - RNA, 20 nt, Artificial Sequence
  SARM1 targeting guide sequence portion
caagagccugcaaggcaaga

SEQ ID NO: 3419 - RNA, 20 nt, Artificial Sequence
  SARM1 targeting guide sequence portion
caagaugccugccacgcucc

SEQ ID NO: 3420 - RNA, 20 nt, Artificial Sequence
  SARM1 targeting guide sequence portion
caagcauucggaggagacau

SEQ ID NO: 3421 - RNA, 20 nt, Artificial Sequence
  SARM1 targeting guide sequence portion
caagccagggccgcgggccc

SEQ ID NO: 3422 - RNA, 20 nt, Artificial Sequence
  SARM1 targeting guide sequence portion
caagcggcuccacgagcgcc

SEQ ID NO: 3423 - RNA, 20 nt, Artificial Sequence
  SARM1 targeting guide sequence portion
caagcgguuagagucgagca

SEQ ID NO: 3424 - RNA, 20 nt, Artificial Sequence
  SARM1 targeting guide sequence portion
caaggaggacgagcugcuuc

SEQ ID NO: 3425 - RNA, 20 nt, Artificial Sequence
  SARM1 targeting guide sequence portion
caaggagguggagcgcgagg

SEQ ID NO: 3426 - RNA, 20 nt, Artificial Sequence
  SARM1 targeting guide sequence portion
caauacagcaccgcguccag

SEQ ID NO: 3427 - RNA, 20 nt, Artificial Sequence
  SARM1 targeting guide sequence portion
caaugcgcgccacgcggucu

SEQ ID NO: 3428 - RNA, 20 nt, Artificial Sequence
  SARM1 targeting guide sequence portion
cacaagccagggccgcgggc

SEQ ID NO: 3429 - RNA, 20 nt, Artificial Sequence
  SARM1 targeting guide sequence portion
cacaagcggcuccacgagcg

SEQ ID NO: 3430 - RNA, 20 nt, Artificial Sequence
  SARM1 targeting guide sequence portion
cacauguucaagcauucgga

SEQ ID NO: 3431 - RNA, 20 nt, Artificial Sequence
  SARM1 targeting guide sequence portion
caccaauacagcaccgcguc

SEQ ID NO: 3432 - RNA, 20 nt, Artificial Sequence
  SARM1 targeting guide sequence portion
caccagacagcgggcgaagc

SEQ ID NO: 3433 - RNA, 20 nt, Artificial Sequence
  SARM1 targeting guide sequence portion
caccagccucuggcaugucu

SEQ ID NO: 3434 - RNA, 20 nt, Artificial Sequence
  SARM1 targeting guide sequence portion
cacccaccuuggucuugccu

SEQ ID NO: 3435 - RNA, 20 nt, Artificial Sequence
  SARM1 targeting guide sequence portion
caccgccuggcccccgugca

SEQ ID NO: 3436 - RNA, 20 nt, Artificial Sequence
  SARM1 targeting guide sequence portion
caccgcguccaggccgccgg

SEQ ID NO: 3437 - RNA, 20 nt, Artificial Sequence
  SARM1 targeting guide sequence portion
caccgcuacugcgaggcagg

SEQ ID NO: 3438 - RNA, 20 nt, Artificial Sequence
  SARM1 targeting guide sequence portion
caccuccuuguuagucgcca

SEQ ID NO: 3439 - RNA, 20 nt, Artificial Sequence
  SARM1 targeting guide sequence portion
caccucgcgcuccaccuccu

SEQ ID NO: 3440 - RNA, 20 nt, Artificial Sequence
  SARM1 targeting guide sequence portion
caccuuggucuugccuugca

SEQ ID NO: 3441 - RNA, 20 nt, Artificial Sequence
  SARM1 targeting guide sequence portion
cacgagcgccagcgugcccg

SEQ ID NO: 3442 - RNA, 20 nt, Artificial Sequence
  SARM1 targeting guide sequence portion
cacgaggcgcugcaggucgu

SEQ ID NO: 3443 - RNA, 20 nt, Artificial Sequence
  SARM1 targeting guide sequence portion
cacgcccagcccaaugcgcg

SEQ ID NO: 3444 - RNA, 20 nt, Artificial Sequence
  SARM1 targeting guide sequence portion
cacgccugccucgcaguagc

SEQ ID NO: 3445 - RNA, 20 nt, Artificial Sequence
  SARM1 targeting guide sequence portion
cacgcuccgcgccagcucua

SEQ ID NO: 3446 - RNA, 20 nt, Artificial Sequence
  SARM1 targeting guide sequence portion
cacgcuggcgcucguggagc

SEQ ID NO: 3447 - RNA, 20 nt, Artificial Sequence
  SARM1 targeting guide sequence portion
cacggaccccgcgcugcugc

SEQ ID NO: 3448 - RNA, 20 nt, Artificial Sequence
  SARM1 targeting guide sequence portion
cacgggggccaggcggugca

SEQ ID NO: 3449 - RNA, 20 nt, Artificial Sequence
  SARM1 targeting guide sequence portion
cacucggcugcgcgcuucuc

SEQ ID NO: 3450 - RNA, 20 nt, Artificial Sequence
  SARM1 targeting guide sequence portion
cacugcgccuccaagcgguu

SEQ ID NO: 3451 - RNA, 20 nt, Artificial Sequence
  SARM1 targeting guide sequence portion
cacugcgcgcuggcgcuggg

SEQ ID NO: 3452 - RNA, 20 nt, Artificial Sequence
  SARM1 targeting guide sequence portion
cagacagcgggcgaagcggc

SEQ ID NO: 3453 - RNA, 20 nt, Artificial Sequence
  SARM1 targeting guide sequence portion
cagagaccgcguggcgcgca

SEQ ID NO: 3454 - RNA, 20 nt, Artificial Sequence
  SARM1 targeting guide sequence portion
cagaggcugguggcggccgg

SEQ ID NO: 3455 - RNA, 20 nt, Artificial Sequence
  SARM1 targeting guide sequence portion
cagagguagaaagccccgau

SEQ ID NO: 3456 - RNA, 20 nt, Artificial Sequence
  SARM1 targeting guide sequence portion
cagcaccgcguccaggccgc

SEQ ID NO: 3457 - RNA, 20 nt, Artificial Sequence
  SARM1 targeting guide sequence portion
cagcagcgcgggguccgugc

SEQ ID NO: 3458 - RNA, 20 nt, Artificial Sequence
  SARM1 targeting guide sequence portion
cagcccaaugcgcgccacgc

SEQ ID NO: 3459 - RNA, 20 nt, Artificial Sequence
  SARM1 targeting guide sequence portion
cagccgaagcagcucguccu

SEQ ID NO: 3460 - RNA, 20 nt, Artificial Sequence
  SARM1 targeting guide sequence portion
cagccgaguggcucuucccg

SEQ ID NO: 3461 - RNA, 20 nt, Artificial Sequence
  SARM1 targeting guide sequence portion
cagccucggcgcagagguag

SEQ ID NO: 3462 - RNA, 20 nt, Artificial Sequence
  SARM1 targeting guide sequence portion
cagccucuggcaugucuccu

SEQ ID NO: 3463 - RNA, 20 nt, Artificial Sequence
  SARM1 targeting guide sequence portion
cagcgacacaagccagggcc

SEQ ID NO: 3464 - RNA, 20 nt, Artificial Sequence
  SARM1 targeting guide sequence portion
cagcgacgcaugguagagaa

SEQ ID NO: 3465 - RNA, 20 nt, Artificial Sequence
  SARM1 targeting guide sequence portion
cagcgaggccacaagcggcu

SEQ ID NO: 3466 - RNA, 20 nt, Artificial Sequence
  SARM1 targeting guide sequence portion
cagcgccagcgcgcaguggc

SEQ ID NO: 3467 - RNA, 20 nt, Artificial Sequence
  SARM1 targeting guide sequence portion
cagcgccucgugccguugcu

SEQ ID NO: 3468 - RNA, 20 nt, Artificial Sequence
  SARM1 targeting guide sequence portion
cagcgcgcaguggcgcagca

SEQ ID NO: 3469 - RNA, 20 nt, Artificial Sequence
  SARM1 targeting guide sequence portion
cagcgcgcaguugcccagcg

SEQ ID NO: 3470 - RNA, 20 nt, Artificial Sequence
  SARM1 targeting guide sequence portion
cagcgcgggguccgugcggc

SEQ ID NO: 3471 - RNA, 20 nt, Artificial Sequence
  SARM1 targeting guide sequence portion
cagcgggcgaagcggccagg

SEQ ID NO: 3472 - RNA, 20 nt, Artificial Sequence
  SARM1 targeting guide sequence portion
cagcgugcccgagcgcucca

SEQ ID NO: 3473 - RNA, 20 nt, Artificial Sequence
  SARM1 targeting guide sequence portion
cagcucguccuccuuggaga

SEQ ID NO: 3474 - RNA, 20 nt, Artificial Sequence
  SARM1 targeting guide sequence portion
cagcucuacggguucgcguu

SEQ ID NO: 3475 - RNA, 20 nt, Artificial Sequence
  SARM1 targeting guide sequence portion
caggaucacgcccagcccaa

SEQ ID NO: 3476 - RNA, 20 nt, Artificial Sequence
  SARM1 targeting guide sequence portion
caggcaucuuggagcacaug

SEQ ID NO: 3477 - RNA, 20 nt, Artificial Sequence
  SARM1 targeting guide sequence portion
caggccgccggccgccacca

SEQ ID NO: 3478 - RNA, 20 nt, Artificial Sequence
  SARM1 targeting guide sequence portion
caggcggugcagcgacgcau

SEQ ID NO: 3479 - RNA, 20 nt, Artificial Sequence
  SARM1 targeting guide sequence portion
caggcgugcagccgaagcag

SEQ ID NO: 3480 - RNA, 20 nt, Artificial Sequence
  SARM1 targeting guide sequence portion
caggcucuugauggcagccu

SEQ ID NO: 3481 - RNA, 20 nt, Artificial Sequence
  SARM1 targeting guide sequence portion
cagggccgcgggcccgacga

SEQ ID NO: 3482 - RNA, 20 nt, Artificial Sequence
  SARM1 targeting guide sequence portion
caggguccagcgaggccaca

SEQ ID NO: 3483 - RNA, 20 nt, Artificial Sequence
  SARM1 targeting guide sequence portion
caggucgucgggcccgcggc

SEQ ID NO: 3484 - RNA, 20 nt, Artificial Sequence
  SARM1 targeting guide sequence portion
cagguucaggaucacgccca

SEQ ID NO: 3485 - RNA, 20 nt, Artificial Sequence
  SARM1 targeting guide sequence portion
caguagcgguguuggcgacu

SEQ ID NO: 3486 - RNA, 20 nt, Artificial Sequence
  SARM1 targeting guide sequence portion
cagugcaucggggcuuucua

SEQ ID NO: 3487 - RNA, 20 nt, Artificial Sequence
  SARM1 targeting guide sequence portion
caguggcgcagcagcgcggg

SEQ ID NO: 3488 - RNA, 20 nt, Artificial Sequence
  SARM1 targeting guide sequence portion
caguugcccagcgccagcgc

SEQ ID NO: 3489 - RNA, 20 nt, Artificial Sequence
  SARM1 targeting guide sequence portion
caucaagagccugcaaggca

SEQ ID NO: 3490 - RNA, 20 nt, Artificial Sequence
  SARM1 targeting guide sequence portion
caucggggcuuucuaccucu

SEQ ID NO: 3491 - RNA, 20 nt, Artificial Sequence
  SARM1 targeting guide sequence portion
caucuuggagcacauguuca

SEQ ID NO: 3492 - RNA, 20 nt, Artificial Sequence
  SARM1 targeting guide sequence portion
caugccagaggcugguggcg

SEQ ID NO: 3493 - RNA, 20 nt, Artificial Sequence
  SARM1 targeting guide sequence portion
caugcgucgcugcaccgccu

SEQ ID NO: 3494 - RNA, 20 nt, Artificial Sequence
  SARM1 targeting guide sequence portion
caugguagagaagcgcgcag

SEQ ID NO: 3495 - RNA, 20 nt, Artificial Sequence
  SARM1 targeting guide sequence portion
caugucuccuccgaaugcuu

SEQ ID NO: 3496 - RNA, 20 nt, Artificial Sequence
  SARM1 targeting guide sequence portion
caugugcuccaagaugccug

SEQ ID NO: 3497 - RNA, 20 nt, Artificial Sequence
  SARM1 targeting guide sequence portion
cauguucaagcauucggagg

SEQ ID NO: 3498 - RNA, 20 nt, Artificial Sequence
  SARM1 targeting guide sequence portion
cauucggaggagacaugcca

SEQ ID NO: 3499 - RNA, 20 nt, Artificial Sequence
  SARM1 targeting guide sequence portion
cauugggcugggcgugaucc

SEQ ID NO: 3500 - RNA, 20 nt, Artificial Sequence
  SARM1 targeting guide sequence portion
ccaacaccgcuacugcgagg

SEQ ID NO: 3501 - RNA, 20 nt, Artificial Sequence
  SARM1 targeting guide sequence portion
ccaagaugccugccacgcuc

SEQ ID NO: 3502 - RNA, 20 nt, Artificial Sequence
  SARM1 targeting guide sequence portion
ccaagcgguuagagucgagc

SEQ ID NO: 3503 - RNA, 20 nt, Artificial Sequence
  SARM1 targeting guide sequence portion
ccaaggaggacgagcugcuu

SEQ ID NO: 3504 - RNA, 20 nt, Artificial Sequence
  SARM1 targeting guide sequence portion
ccaauacagcaccgcgucca

SEQ ID NO: 3505 - RNA, 20 nt, Artificial Sequence
  SARM1 targeting guide sequence portion
ccaaugcgcgccacgcgguc

SEQ ID NO: 3506 - RNA, 20 nt, Artificial Sequence
  SARM1 targeting guide sequence portion
ccacaagcggcuccacgagc

SEQ ID NO: 3507 - RNA, 20 nt, Artificial Sequence
  SARM1 targeting guide sequence portion
ccaccagacagcgggcgaag

SEQ ID NO: 3508 - RNA, 20 nt, Artificial Sequence
  SARM1 targeting guide sequence portion
ccaccagccucuggcauguc

SEQ ID NO: 3509 - RNA, 20 nt, Artificial Sequence
  SARM1 targeting guide sequence portion
ccaccuccuuguuagucgcc

SEQ ID NO: 3510 - RNA, 20 nt, Artificial Sequence
  SARM1 targeting guide sequence portion
ccaccucgcgcuccaccucc

SEQ ID NO: 3511 - RNA, 20 nt, Artificial Sequence
  SARM1 targeting guide sequence portion
ccaccuuggucuugccuugc

SEQ ID NO: 3512 - RNA, 20 nt, Artificial Sequence
  SARM1 targeting guide sequence portion
ccacgagcgccagcgugccc

SEQ ID NO: 3513 - RNA, 20 nt, Artificial Sequence
  SARM1 targeting guide sequence portion
ccacgcuccgcgccagcucu

SEQ ID NO: 3514 - RNA, 20 nt, Artificial Sequence
  SARM1 targeting guide sequence portion
ccacucggcugcgcgcuucu

SEQ ID NO: 3515 - RNA, 20 nt, Artificial Sequence
  SARM1 targeting guide sequence portion
ccacugcgcgcuggcgcugg

SEQ ID NO: 3516 - RNA, 20 nt, Artificial Sequence
  SARM1 targeting guide sequence portion
ccagacagcgggcgaagcgg

SEQ ID NO: 3517 - RNA, 20 nt, Artificial Sequence
  SARM1 targeting guide sequence portion
ccagaggcugguggcggccg

SEQ ID NO: 3518 - RNA, 20 nt, Artificial Sequence
  SARM1 targeting guide sequence portion
ccagcccaaugcgcgccacg

SEQ ID NO: 3519 - RNA, 20 nt, Artificial Sequence
  SARM1 targeting guide sequence portion
ccagccucuggcaugucucc

SEQ ID NO: 3520 - RNA, 20 nt, Artificial Sequence
  SARM1 targeting guide sequence portion
ccagcgacacaagccagggc

SEQ ID NO: 3521 - RNA, 20 nt, Artificial Sequence
  SARM1 targeting guide sequence portion
ccagcgaggccacaagcggc

SEQ ID NO: 3522 - RNA, 20 nt, Artificial Sequence
  SARM1 targeting guide sequence portion
ccagcgccagcgcgcagugg

SEQ ID NO: 3523 - RNA, 20 nt, Artificial Sequence
  SARM1 targeting guide sequence portion
ccagcgcgcaguggcgcagc

SEQ ID NO: 3524 - RNA, 20 nt, Artificial Sequence
  SARM1 targeting guide sequence portion
ccagcgugcccgagcgcucc

SEQ ID NO: 3525 - RNA, 20 nt, Artificial Sequence
  SARM1 targeting guide sequence portion
ccagcucuacggguucgcgu

SEQ ID NO: 3526 - RNA, 20 nt, Artificial Sequence
  SARM1 targeting guide sequence portion
ccaggccgccggccgccacc

SEQ ID NO: 3527 - RNA, 20 nt, Artificial Sequence
  SARM1 targeting guide sequence portion
ccaggcggugcagcgacgca

SEQ ID NO: 3528 - RNA, 20 nt, Artificial Sequence
  SARM1 targeting guide sequence portion
ccagggccgcgggcccgacg

SEQ ID NO: 3529 - RNA, 20 nt, Artificial Sequence
  SARM1 targeting guide sequence portion
ccaggguccagcgaggccac

SEQ ID NO: 3530 - RNA, 20 nt, Artificial Sequence
  SARM1 targeting guide sequence portion
ccagguucaggaucacgccc

SEQ ID NO: 3531 - RNA, 20 nt, Artificial Sequence
  SARM1 targeting guide sequence portion
ccaucaagagccugcaaggc

SEQ ID NO: 3532 - RNA, 20 nt, Artificial Sequence
  SARM1 targeting guide sequence portion
ccaugcgucgcugcaccgcc

SEQ ID NO: 3533 - RNA, 20 nt, Artificial Sequence
  SARM1 targeting guide sequence portion
cccaaugcgcgccacgcggu

SEQ ID NO: 3534 - RNA, 20 nt, Artificial Sequence
  SARM1 targeting guide sequence portion
cccaccuuggucuugccuug

SEQ ID NO: 3535 - RNA, 20 nt, Artificial Sequence
  SARM1 targeting guide sequence portion
cccagcccaaugcgcgccac

SEQ ID NO: 3536 - RNA, 20 nt, Artificial Sequence
  SARM1 targeting guide sequence portion
cccagcgccagcgcgcagug

SEQ ID NO: 3537 - RNA, 20 nt, Artificial Sequence
  SARM1 targeting guide sequence portion
cccccgugcagcgcgcaguu

SEQ ID NO: 3538 - RNA, 20 nt, Artificial Sequence
  SARM1 targeting guide sequence portion
ccccgaugcacugcgccucc

SEQ ID NO: 3539 - RNA, 20 nt, Artificial Sequence
  SARM1 targeting guide sequence portion
ccccgcgcugcugcgccacu

SEQ ID NO: 3540 - RNA, 20 nt, Artificial Sequence
  SARM1 targeting guide sequence portion
ccccgugcagcgcgcaguug

SEQ ID NO: 3541 - RNA, 20 nt, Artificial Sequence
  SARM1 targeting guide sequence portion
cccgacgaccugcagcgccu

SEQ ID NO: 3542 - RNA, 20 nt, Artificial Sequence
  SARM1 targeting guide sequence portion
cccgagcgcuccaccucgcg

SEQ ID NO: 3543 - RNA, 20 nt, Artificial Sequence
  SARM1 targeting guide sequence portion
cccgaugcacugcgccucca

SEQ ID NO: 3544 - RNA, 20 nt, Artificial Sequence
  SARM1 targeting guide sequence portion
cccgcgcugcugcgccacug

SEQ ID NO: 3545 - RNA, 20 nt, Artificial Sequence
  SARM1 targeting guide sequence portion
cccgcggcccuggcuugugu

SEQ ID NO: 3546 - RNA, 20 nt, Artificial Sequence
  SARM1 targeting guide sequence portion
cccgcucgccuucuccaagg

SEQ ID NO: 3547 - RNA, 20 nt, Artificial Sequence
  SARM1 targeting guide sequence portion
cccgcugucugguggacgcc

SEQ ID NO: 3548 - RNA, 20 nt, Artificial Sequence
  SARM1 targeting guide sequence portion
cccguagagcuggcgcggag

SEQ ID NO: 3549 - RNA, 20 nt, Artificial Sequence
  SARM1 targeting guide sequence portion
cccgugcagcgcgcaguugc

SEQ ID NO: 3550 - RNA, 20 nt, Artificial Sequence
  SARM1 targeting guide sequence portion
cccuggccgcuucgcccgcu

SEQ ID NO: 3551 - RNA, 20 nt, Artificial Sequence
  SARM1 targeting guide sequence portion
cccuggcuugugucgcuggc

SEQ ID NO: 3552 - RNA, 20 nt, Artificial Sequence
  SARM1 targeting guide sequence portion
ccgaagcagcucguccuccu

SEQ ID NO: 3553 - RNA, 20 nt, Artificial Sequence
  SARM1 targeting guide sequence portion
ccgaaugcuugaacaugugc

SEQ ID NO: 3554 - RNA, 20 nt, Artificial Sequence
  SARM1 targeting guide sequence portion
ccgacgaccugcagcgccuc

SEQ ID NO: 3555 - RNA, 20 nt, Artificial Sequence
  SARM1 targeting guide sequence portion
ccgagcgcuccaccucgcgc

SEQ ID NO: 3556 - RNA, 20 nt, Artificial Sequence
  SARM1 targeting guide sequence portion
ccgaggcugccaucaagagc

SEQ ID NO: 3557 - RNA, 20 nt, Artificial Sequence
  SARM1 targeting guide sequence portion
ccgaguggcucuucccgcuc

SEQ ID NO: 3558 - RNA, 20 nt, Artificial Sequence
  SARM1 targeting guide sequence portion
ccgaugcacugcgccuccaa

SEQ ID NO: 3559 - RNA, 20 nt, Artificial Sequence
  SARM1 targeting guide sequence portion
ccgcacggaccccgcgcugc

SEQ ID NO: 3560 - RNA, 20 nt, Artificial Sequence
  SARM1 targeting guide sequence portion
ccgccaccagccucuggcau

SEQ ID NO: 3561 - RNA, 20 nt, Artificial Sequence
  SARM1 targeting guide sequence portion
ccgccgcacggaccccgcgc

SEQ ID NO: 3562 - RNA, 20 nt, Artificial Sequence
  SARM1 targeting guide sequence portion
ccgccggccgccaccagccu

SEQ ID NO: 3563 - RNA, 20 nt, Artificial Sequence
  SARM1 targeting guide sequence portion
ccgccuggcccccgugcagc

SEQ ID NO: 3564 - RNA, 20 nt, Artificial Sequence
  SARM1 targeting guide sequence portion
ccgcgccagcucuacggguu

SEQ ID NO: 3565 - RNA, 20 nt, Artificial Sequence
  SARM1 targeting guide sequence portion
ccgcgcugcugcgccacugc

SEQ ID NO: 3566 - RNA, 20 nt, Artificial Sequence
  SARM1 targeting guide sequence portion
ccgcggcccuggcuuguguc

SEQ ID NO: 3567 - RNA, 20 nt, Artificial Sequence
  SARM1 targeting guide sequence portion
ccgcgggcccgacgaccugc

SEQ ID NO: 3568 - RNA, 20 nt, Artificial Sequence
  SARM1 targeting guide sequence portion
ccgcguggcgcgcauugggc

SEQ ID NO: 3569 - RNA, 20 nt, Artificial Sequence
  SARM1 targeting guide sequence portion
ccgcuacugcgaggcaggcg

SEQ ID NO: 3570 - RNA, 20 nt, Artificial Sequence
  SARM1 targeting guide sequence portion
ccgcucgccuucuccaagga

SEQ ID NO: 3571 - RNA, 20 nt, Artificial Sequence
  SARM1 targeting guide sequence portion
ccgcugucugguggacgcca

SEQ ID NO: 3572 - RNA, 20 nt, Artificial Sequence
  SARM1 targeting guide sequence portion
ccgcuucgcccgcugucugg

SEQ ID NO: 3573 - RNA, 20 nt, Artificial Sequence
  SARM1 targeting guide sequence portion
ccgcuuggaggcgcagugca

SEQ ID NO: 3574 - RNA, 20 nt, Artificial Sequence
  SARM1 targeting guide sequence portion
ccgcuuguggccucgcugga

SEQ ID NO: 3575 - RNA, 20 nt, Artificial Sequence
  SARM1 targeting guide sequence portion
ccggccgccaccagccucug

SEQ ID NO: 3576 - RNA, 20 nt, Artificial Sequence
  SARM1 targeting guide sequence portion
ccggcggccuggacgcggug

SEQ ID NO: 3577 - RNA, 20 nt, Artificial Sequence
  SARM1 targeting guide sequence portion
ccguagagcuggcgcggagc

SEQ ID NO: 3578 - RNA, 20 nt, Artificial Sequence
  SARM1 targeting guide sequence portion
ccgugcagcgcgcaguugcc

SEQ ID NO: 3579 - RNA, 20 nt, Artificial Sequence
  SARM1 targeting guide sequence portion
ccgugcggcggcaccaauac

SEQ ID NO: 3580 - RNA, 20 nt, Artificial Sequence
  SARM1 targeting guide sequence portion
ccguugcucgacucuaaccg

SEQ ID NO: 3581 - RNA, 20 nt, Artificial Sequence
  SARM1 targeting guide sequence portion
ccuccaagcgguuagagucg

SEQ ID NO: 3582 - RNA, 20 nt, Artificial Sequence
  SARM1 targeting guide sequence portion
ccuccgaaugcuugaacaug

SEQ ID NO: 3583 - RNA, 20 nt, Artificial Sequence
  SARM1 targeting guide sequence portion
ccuccuuggagaaggcgagc

SEQ ID NO: 3584 - RNA, 20 nt, Artificial Sequence
  SARM1 targeting guide sequence portion
ccuccuuguuagucgccaac

SEQ ID NO: 3585 - RNA, 20 nt, Artificial Sequence
  SARM1 targeting guide sequence portion
ccucgcaguagcgguguugg

SEQ ID NO: 3586 - RNA, 20 nt, Artificial Sequence
  SARM1 targeting guide sequence portion
ccucgcgcuccaccuccuug

SEQ ID NO: 3587 - RNA, 20 nt, Artificial Sequence
  SARM1 targeting guide sequence portion
ccucgcuggacccuggccgc

SEQ ID NO: 3588 - RNA, 20 nt, Artificial Sequence
  SARM1 targeting guide sequence portion
ccucggcgcagagguagaaa

SEQ ID NO: 3589 - RNA, 20 nt, Artificial Sequence
  SARM1 targeting guide sequence portion
ccucgugccguugcucgacu

SEQ ID NO: 3590 - RNA, 20 nt, Artificial Sequence
  SARM1 targeting guide sequence portion
ccucugcgccgaggcugcca

SEQ ID NO: 3591 - RNA, 20 nt, Artificial Sequence
  SARM1 targeting guide sequence portion
ccucuggcaugucuccuccg

SEQ ID NO: 3592 - RNA, 20 nt, Artificial Sequence
  SARM1 targeting guide sequence portion
ccugaaccuggcgaaggaac

SEQ ID NO: 3593 - RNA, 20 nt, Artificial Sequence
  SARM1 targeting guide sequence portion
ccugcaaggcaagaccaagg

SEQ ID NO: 3594 - RNA, 20 nt, Artificial Sequence
  SARM1 targeting guide sequence portion
ccugcagcgccucgugccgu

SEQ ID NO: 3595 - RNA, 20 nt, Artificial Sequence
  SARM1 targeting guide sequence portion
ccugccacgcuccgcgccag

SEQ ID NO: 3596 - RNA, 20 nt, Artificial Sequence
  SARM1 targeting guide sequence portion
ccugccucgcaguagcggug

SEQ ID NO: 3597 - RNA, 20 nt, Artificial Sequence
  SARM1 targeting guide sequence portion
ccuggacgcggugcuguauu

SEQ ID NO: 3598 - RNA, 20 nt, Artificial Sequence
  SARM1 targeting guide sequence portion
ccuggcccccgugcagcgcg

SEQ ID NO: 3599 - RNA, 20 nt, Artificial Sequence
  SARM1 targeting guide sequence portion
ccuggccgcuucgcccgcug

SEQ ID NO: 3600 - RNA, 20 nt, Artificial Sequence
  SARM1 targeting guide sequence portion
ccuggcgaaggaacgcgaac

SEQ ID NO: 3601 - RNA, 20 nt, Artificial Sequence
  SARM1 targeting guide sequence portion
ccuggcuugugucgcuggcg

SEQ ID NO: 3602 - RNA, 20 nt, Artificial Sequence
  SARM1 targeting guide sequence portion
ccuucgccagguucaggauc

SEQ ID NO: 3603 - RNA, 20 nt, Artificial Sequence
  SARM1 targeting guide sequence portion
ccuucuccaaggaggacgag

SEQ ID NO: 3604 - RNA, 20 nt, Artificial Sequence
  SARM1 targeting guide sequence portion
ccuugcaggcucuugauggc

SEQ ID NO: 3605 - RNA, 20 nt, Artificial Sequence
  SARM1 targeting guide sequence portion
ccuuggagaaggcgagcggg

SEQ ID NO: 3606 - RNA, 20 nt, Artificial Sequence
  SARM1 targeting guide sequence portion
ccuuggucuugccuugcagg

SEQ ID NO: 3607 - RNA, 20 nt, Artificial Sequence
  SARM1 targeting guide sequence portion
ccuuguuagucgccaacacc

SEQ ID NO: 3608 - RNA, 20 nt, Artificial Sequence
  SARM1 targeting guide sequence portion
cgaacccguagagcuggcgc

SEQ ID NO: 3609 - RNA, 20 nt, Artificial Sequence
  SARM1 targeting guide sequence portion
cgaagcagcucguccuccuu

SEQ ID NO: 3610 - RNA, 20 nt, Artificial Sequence
  SARM1 targeting guide sequence portion
cgaagcggccaggguccagc

SEQ ID NO: 3611 - RNA, 20 nt, Artificial Sequence
  SARM1 targeting guide sequence portion
cgaaggaacgcgaacccgua

SEQ ID NO: 3612 - RNA, 20 nt, Artificial Sequence
  SARM1 targeting guide sequence portion
cgaaugcuugaacaugugcu

SEQ ID NO: 3613 - RNA, 20 nt, Artificial Sequence
  SARM1 targeting guide sequence portion
cgacacaagccagggccgcg

SEQ ID NO: 3614 - RNA, 20 nt, Artificial Sequence
  SARM1 targeting guide sequence portion
cgaccugcagcgccucgugc

SEQ ID NO: 3615 - RNA, 20 nt, Artificial Sequence
  SARM1 targeting guide sequence portion
cgacgaccugcagcgccucg

SEQ ID NO: 3616 - RNA, 20 nt, Artificial Sequence
  SARM1 targeting guide sequence portion
cgacgcaugguagagaagcg

SEQ ID NO: 3617 - RNA, 20 nt, Artificial Sequence
  SARM1 targeting guide sequence portion
cgacuaacaaggagguggag

SEQ ID NO: 3618 - RNA, 20 nt, Artificial Sequence
  SARM1 targeting guide sequence portion
cgacucuaaccgcuuggagg

SEQ ID NO: 3619 - RNA, 20 nt, Artificial Sequence
  SARM1 targeting guide sequence portion
cgagcaacggcacgaggcgc

SEQ ID NO: 3620 - RNA, 20 nt, Artificial Sequence
  SARM1 targeting guide sequence portion
cgagcgccagcgugcccgag

SEQ ID NO: 3621 - RNA, 20 nt, Artificial Sequence
  SARM1 targeting guide sequence portion
cgagcgcuccaccucgcgcu

SEQ ID NO: 3622 - RNA, 20 nt, Artificial Sequence
  SARM1 targeting guide sequence portion
cgagcgggaagagccacucg

SEQ ID NO: 3623 - RNA, 20 nt, Artificial Sequence
  SARM1 targeting guide sequence portion
cgagcugcuucggcugcacg

SEQ ID NO: 3624 - RNA, 20 nt, Artificial Sequence
  SARM1 targeting guide sequence portion
cgaggcaggcgugcagccga

SEQ ID NO: 3625 - RNA, 20 nt, Artificial Sequence
  SARM1 targeting guide sequence portion
cgaggccacaagcggcucca

SEQ ID NO: 3626 - RNA, 20 nt, Artificial Sequence
  SARM1 targeting guide sequence portion
cgaggcgcugcaggucgucg

SEQ ID NO: 3627 - RNA, 20 nt, Artificial Sequence
  SARM1 targeting guide sequence portion
cgaggcugccaucaagagcc

SEQ ID NO: 3628 - RNA, 20 nt, Artificial Sequence
  SARM1 targeting guide sequence portion
cgagguggagcgcucgggca

SEQ ID NO: 3629 - RNA, 20 nt, Artificial Sequence
  SARM1 targeting guide sequence portion
cgaguggcucuucccgcucg

SEQ ID NO: 3630 - RNA, 20 nt, Artificial Sequence
  SARM1 targeting guide sequence portion
cgaugcacugcgccuccaag

SEQ ID NO: 3631 - RNA, 20 nt, Artificial Sequence
  SARM1 targeting guide sequence portion
cgcacggaccccgcgcugcu

SEQ ID NO: 3632 - RNA, 20 nt, Artificial Sequence
  SARM1 targeting guide sequence portion
cgcagagguagaaagccccg

SEQ ID NO: 3633 - RNA, 20 nt, Artificial Sequence
  SARM1 targeting guide sequence portion
cgcagcagcgcgggguccgu

SEQ ID NO: 3634 - RNA, 20 nt, Artificial Sequence
  SARM1 targeting guide sequence portion
cgcagccgaguggcucuucc

SEQ ID NO: 3635 - RNA, 20 nt, Artificial Sequence
  SARM1 targeting guide sequence portion
cgcaguagcgguguuggcga

SEQ ID NO: 3636 - RNA, 20 nt, Artificial Sequence
  SARM1 targeting guide sequence portion
cgcagugcaucggggcuuuc

SEQ ID NO: 3637 - RNA, 20 nt, Artificial Sequence
  SARM1 targeting guide sequence portion
cgcaguggcgcagcagcgcg

SEQ ID NO: 3638 - RNA, 20 nt, Artificial Sequence
  SARM1 targeting guide sequence portion
cgcaguugcccagcgccagc

SEQ ID NO: 3639 - RNA, 20 nt, Artificial Sequence
  SARM1 targeting guide sequence portion
cgcaugguagagaagcgcgc

SEQ ID NO: 3640 - RNA, 20 nt, Artificial Sequence
  SARM1 targeting guide sequence portion
cgcauugggcugggcgugau

SEQ ID NO: 3641 - RNA, 20 nt, Artificial Sequence
  SARM1 targeting guide sequence portion
cgccaacaccgcuacugcga

SEQ ID NO: 3642 - RNA, 20 nt, Artificial Sequence
  SARM1 targeting guide sequence portion
cgccaccagccucuggcaug

SEQ ID NO: 3643 - RNA, 20 nt, Artificial Sequence
  SARM1 targeting guide sequence portion
cgccacugcgcgcuggcgcu

SEQ ID NO: 3644 - RNA, 20 nt, Artificial Sequence
  SARM1 targeting guide sequence portion
cgccagcgacacaagccagg

SEQ ID NO: 3645 - RNA, 20 nt, Artificial Sequence
  SARM1 targeting guide sequence portion
cgccagcgcgcaguggcgca

SEQ ID NO: 3646 - RNA, 20 nt, Artificial Sequence
  SARM1 targeting guide sequence portion
cgccagcgugcccgagcgcu

SEQ ID NO: 3647 - RNA, 20 nt, Artificial Sequence
  SARM1 targeting guide sequence portion
cgccagcucuacggguucgc

SEQ ID NO: 3648 - RNA, 20 nt, Artificial Sequence
  SARM1 targeting guide sequence portion
cgccagguucaggaucacgc

SEQ ID NO: 3649 - RNA, 20 nt, Artificial Sequence
  SARM1 targeting guide sequence portion
cgcccagcccaaugcgcgcc

SEQ ID NO: 3650 - RNA, 20 nt, Artificial Sequence
  SARM1 targeting guide sequence portion
cgcccgcugucugguggacg

SEQ ID NO: 3651 - RNA, 20 nt, Artificial Sequence
  SARM1 targeting guide sequence portion
cgccgaggcugccaucaaga

SEQ ID NO: 3652 - RNA, 20 nt, Artificial Sequence
  SARM1 targeting guide sequence portion
cgccgcacggaccccgcgcu

SEQ ID NO: 3653 - RNA, 20 nt, Artificial Sequence
  SARM1 targeting guide sequence portion
cgccggccgccaccagccuc

SEQ ID NO: 3654 - RNA, 20 nt, Artificial Sequence
  SARM1 targeting guide sequence portion
cgccuccaagcgguuagagu

SEQ ID NO: 3655 - RNA, 20 nt, Artificial Sequence
  SARM1 targeting guide sequence portion
cgccucgugccguugcucga

SEQ ID NO: 3656 - RNA, 20 nt, Artificial Sequence
  SARM1 targeting guide sequence portion
cgccugccucgcaguagcgg

SEQ ID NO: 3657 - RNA, 20 nt, Artificial Sequence
  SARM1 targeting guide sequence portion
cgccuggcccccgugcagcg

SEQ ID NO: 3658 - RNA, 20 nt, Artificial Sequence
  SARM1 targeting guide sequence portion
cgccuucuccaaggaggacg

SEQ ID NO: 3659 - RNA, 20 nt, Artificial Sequence
  SARM1 targeting guide sequence portion
cgcgaacccguagagcuggc

SEQ ID NO: 3660 - RNA, 20 nt, Artificial Sequence
  SARM1 targeting guide sequence portion
cgcgagguggagcgcucggg

SEQ ID NO: 3661 - RNA, 20 nt, Artificial Sequence
  SARM1 targeting guide sequence portion
cgcgcagccgaguggcucuu

SEQ ID NO: 3662 - RNA, 20 nt, Artificial Sequence
  SARM1 targeting guide sequence portion
cgcgcaguggcgcagcagcg

SEQ ID NO: 3663 - RNA, 20 nt, Artificial Sequence
  SARM1 targeting guide sequence portion
cgcgcaguugcccagcgcca

SEQ ID NO: 3664 - RNA, 20 nt, Artificial Sequence
  SARM1 targeting guide sequence portion
cgcgcauugggcugggcgug

SEQ ID NO: 3665 - RNA, 20 nt, Artificial Sequence
  SARM1 targeting guide sequence portion
cgcgccagcucuacggguuc

SEQ ID NO: 3666 - RNA, 20 nt, Artificial Sequence
  SARM1 targeting guide sequence portion
cgcgcuccaccuccuuguua

SEQ ID NO: 3667 - RNA, 20 nt, Artificial Sequence
  SARM1 targeting guide sequence portion
cgcgcugcacgggggccagg

SEQ ID NO: 3668 - RNA, 20 nt, Artificial Sequence
  SARM1 targeting guide sequence portion
cgcgcugcugcgccacugcg

SEQ ID NO: 3669 - RNA, 20 nt, Artificial Sequence
  SARM1 targeting guide sequence portion
cgcgcuggcgcugggcaacu

SEQ ID NO: 3670 - RNA, 20 nt, Artificial Sequence
  SARM1 targeting guide sequence portion
cgcgcuucucuaccaugcgu

SEQ ID NO: 3671 - RNA, 20 nt, Artificial Sequence
  SARM1 targeting guide sequence portion
cgcggagcguggcaggcauc

SEQ ID NO: 3672 - RNA, 20 nt, Artificial Sequence
  SARM1 targeting guide sequence portion
cgcggcccuggcuugugucg

SEQ ID NO: 3673 - RNA, 20 nt, Artificial Sequence
  SARM1 targeting guide sequence portion
cgcgggcccgacgaccugca

SEQ ID NO: 3674 - RNA, 20 nt, Artificial Sequence
  SARM1 targeting guide sequence portion
cgcgggguccgugcggcggc

SEQ ID NO: 3675 - RNA, 20 nt, Artificial Sequence
  SARM1 targeting guide sequence portion
cgcggugcuguauuggugcc

SEQ ID NO: 3676 - RNA, 20 nt, Artificial Sequence
  SARM1 targeting guide sequence portion
cgcguccaggccgccggccg

SEQ ID NO: 3677 - RNA, 20 nt, Artificial Sequence
  SARM1 targeting guide sequence portion
cgcguggcgcgcauugggcu

SEQ ID NO: 3678 - RNA, 20 nt, Artificial Sequence
  SARM1 targeting guide sequence portion
cgcguuccuucgccagguuc

SEQ ID NO: 3679 - RNA, 20 nt, Artificial Sequence
  SARM1 targeting guide sequence portion
cgcuacugcgaggcaggcgu

SEQ ID NO: 3680 - RNA, 20 nt, Artificial Sequence
  SARM1 targeting guide sequence portion
cgcuccaccuccuuguuagu

SEQ ID NO: 3681 - RNA, 20 nt, Artificial Sequence
  SARM1 targeting guide sequence portion
cgcuccaccucgcgcuccac

SEQ ID NO: 3682 - RNA, 20 nt, Artificial Sequence
  SARM1 targeting guide sequence portion
cgcuccgcgccagcucuacg

SEQ ID NO: 3683 - RNA, 20 nt, Artificial Sequence
  SARM1 targeting guide sequence portion
cgcucgccuucuccaaggag

SEQ ID NO: 3684 - RNA, 20 nt, Artificial Sequence
  SARM1 targeting guide sequence portion
cgcucgggcacgcuggcgcu

SEQ ID NO: 3685 - RNA, 20 nt, Artificial Sequence
  SARM1 targeting guide sequence portion
cgcucguggagccgcuugug

SEQ ID NO: 3686 - RNA, 20 nt, Artificial Sequence
  SARM1 targeting guide sequence portion
cgcugcaccgccuggccccc

SEQ ID NO: 3687 - RNA, 20 nt, Artificial Sequence
  SARM1 targeting guide sequence portion
cgcugcacgggggccaggcg

SEQ ID NO: 3688 - RNA, 20 nt, Artificial Sequence
  SARM1 targeting guide sequence portion
cgcugcaggucgucgggccc

SEQ ID NO: 3689 - RNA, 20 nt, Artificial Sequence
  SARM1 targeting guide sequence portion
cgcugcugcgccacugcgcg

SEQ ID NO: 3690 - RNA, 20 nt, Artificial Sequence
  SARM1 targeting guide sequence portion
cgcuggacccuggccgcuuc

SEQ ID NO: 3691 - RNA, 20 nt, Artificial Sequence
  SARM1 targeting guide sequence portion
cgcuggcgcucguggagccg

SEQ ID NO: 3692 - RNA, 20 nt, Artificial Sequence
  SARM1 targeting guide sequence portion
cgcuggcgcugggcaacugc

SEQ ID NO: 3693 - RNA, 20 nt, Artificial Sequence
  SARM1 targeting guide sequence portion
cgcuggcguccaccagacag

SEQ ID NO: 3694 - RNA, 20 nt, Artificial Sequence
  SARM1 targeting guide sequence portion
cgcugggcaacugcgcgcug

SEQ ID NO: 3695 - RNA, 20 nt, Artificial Sequence
  SARM1 targeting guide sequence portion
cgcugucugguggacgccag

SEQ ID NO: 3696 - RNA, 20 nt, Artificial Sequence
  SARM1 targeting guide sequence portion
cgcuucgcccgcugucuggu

SEQ ID NO: 3697 - RNA, 20 nt, Artificial Sequence
  SARM1 targeting guide sequence portion
cgcuucucuaccaugcgucg

SEQ ID NO: 3698 - RNA, 20 nt, Artificial Sequence
  SARM1 targeting guide sequence portion
cgcuuggaggcgcagugcau

SEQ ID NO: 3699 - RNA, 20 nt, Artificial Sequence
  SARM1 targeting guide sequence portion
cgcuuguggccucgcuggac

SEQ ID NO: 3700 - RNA, 20 nt, Artificial Sequence
  SARM1 targeting guide sequence portion
cggaccccgcgcugcugcgc

SEQ ID NO: 3701 - RNA, 20 nt, Artificial Sequence
  SARM1 targeting guide sequence portion
cggagcguggcaggcaucuu

SEQ ID NO: 3702 - RNA, 20 nt, Artificial Sequence
  SARM1 targeting guide sequence portion
cggaggagacaugccagagg

SEQ ID NO: 3703 - RNA, 20 nt, Artificial Sequence
  SARM1 targeting guide sequence portion
cggcaccaauacagcaccgc

SEQ ID NO: 3704 - RNA, 20 nt, Artificial Sequence
  SARM1 targeting guide sequence portion
cggcacgaggcgcugcaggu

SEQ ID NO: 3705 - RNA, 20 nt, Artificial Sequence
  SARM1 targeting guide sequence portion
cggccaggguccagcgaggc

SEQ ID NO: 3706 - RNA, 20 nt, Artificial Sequence
  SARM1 targeting guide sequence portion
cggcccuggcuugugucgcu

SEQ ID NO: 3707 - RNA, 20 nt, Artificial Sequence
  SARM1 targeting guide sequence portion
cggccgccaccagccucugg

SEQ ID NO: 3708 - RNA, 20 nt, Artificial Sequence
  SARM1 targeting guide sequence portion
cggccggcggccuggacgcg

SEQ ID NO: 3709 - RNA, 20 nt, Artificial Sequence
  SARM1 targeting guide sequence portion
cggccuggacgcggugcugu

SEQ ID NO: 3710 - RNA, 20 nt, Artificial Sequence
  SARM1 targeting guide sequence portion
cggcgcagagguagaaagcc

SEQ ID NO: 3711 - RNA, 20 nt, Artificial Sequence
  SARM1 targeting guide sequence portion
cggcggcaccaauacagcac

SEQ ID NO: 3712 - RNA, 20 nt, Artificial Sequence
  SARM1 targeting guide sequence portion
cggcggccuggacgcggugc

SEQ ID NO: 3713 - RNA, 20 nt, Artificial Sequence
  SARM1 targeting guide sequence portion
cggcuccacgagcgccagcg

SEQ ID NO: 3714 - RNA, 20 nt, Artificial Sequence
  SARM1 targeting guide sequence portion
cggcugcacgccugccucgc

SEQ ID NO: 3715 - RNA, 20 nt, Artificial Sequence
  SARM1 targeting guide sequence portion
cggcugcgcgcuucucuacc

SEQ ID NO: 3716 - RNA, 20 nt, Artificial Sequence
  SARM1 targeting guide sequence portion
cgggaagagccacucggcug

SEQ ID NO: 3717 - RNA, 20 nt, Artificial Sequence
  SARM1 targeting guide sequence portion
cgggcacgcuggcgcucgug

SEQ ID NO: 3718 - RNA, 20 nt, Artificial Sequence
  SARM1 targeting guide sequence portion
cgggcccgacgaccugcagc

SEQ ID NO: 3719 - RNA, 20 nt, Artificial Sequence
  SARM1 targeting guide sequence portion
cgggcccgcggcccuggcuu

SEQ ID NO: 3720 - RNA, 20 nt, Artificial Sequence
  SARM1 targeting guide sequence portion
cgggcgaagcggccaggguc

SEQ ID NO: 3721 - RNA, 20 nt, Artificial Sequence
  SARM1 targeting guide sequence portion
cggggcuuucuaccucugcg

SEQ ID NO: 3722 - RNA, 20 nt, Artificial Sequence
  SARM1 targeting guide sequence portion
cgggggccaggcggugcagc

SEQ ID NO: 3723 - RNA, 20 nt, Artificial Sequence
  SARM1 targeting guide sequence portion
cgggguccgugcggcggcac

SEQ ID NO: 3724 - RNA, 20 nt, Artificial Sequence
  SARM1 targeting guide sequence portion
cggguucgcguuccuucgcc

SEQ ID NO: 3725 - RNA, 20 nt, Artificial Sequence
  SARM1 targeting guide sequence portion
cggugcagcgacgcauggua

SEQ ID NO: 3726 - RNA, 20 nt, Artificial Sequence
  SARM1 targeting guide sequence portion
cggugcuguauuggugccgc

SEQ ID NO: 3727 - RNA, 20 nt, Artificial Sequence
  SARM1 targeting guide sequence portion
cgguguuggcgacuaacaag

SEQ ID NO: 3728 - RNA, 20 nt, Artificial Sequence
  SARM1 targeting guide sequence portion
cgguuagagucgagcaacgg

SEQ ID NO: 3729 - RNA, 20 nt, Artificial Sequence
  SARM1 targeting guide sequence portion
cguagagcuggcgcggagcg

SEQ ID NO: 3730 - RNA, 20 nt, Artificial Sequence
  SARM1 targeting guide sequence portion
cguccaccagacagcgggcg

SEQ ID NO: 3731 - RNA, 20 nt, Artificial Sequence
  SARM1 targeting guide sequence portion
cguccaggccgccggccgcc

SEQ ID NO: 3732 - RNA, 20 nt, Artificial Sequence
  SARM1 targeting guide sequence portion
cguccuccuuggagaaggcg

SEQ ID NO: 3733 - RNA, 20 nt, Artificial Sequence
  SARM1 targeting guide sequence portion
cgucgcugcaccgccuggcc

SEQ ID NO: 3734 - RNA, 20 nt, Artificial Sequence
  SARM1 targeting guide sequence portion
cgucgggcccgcggcccugg

SEQ ID NO: 3735 - RNA, 20 nt, Artificial Sequence
  SARM1 targeting guide sequence portion
cgugauccugaaccuggcga

SEQ ID NO: 3736 - RNA, 20 nt, Artificial Sequence
  SARM1 targeting guide sequence portion
cgugcagccgaagcagcucg

SEQ ID NO: 3737 - RNA, 20 nt, Artificial Sequence
  SARM1 targeting guide sequence portion
cgugcagcgcgcaguugccc

SEQ ID NO: 3738 - RNA, 20 nt, Artificial Sequence
  SARM1 targeting guide sequence portion
cgugcccgagcgcuccaccu

SEQ ID NO: 3739 - RNA, 20 nt, Artificial Sequence
  SARM1 targeting guide sequence portion
cgugccguugcucgacucua

SEQ ID NO: 3740 - RNA, 20 nt, Artificial Sequence
  SARM1 targeting guide sequence portion
cgugcggcggcaccaauaca

SEQ ID NO: 3741 - RNA, 20 nt, Artificial Sequence
  SARM1 targeting guide sequence portion
cguggagccgcuuguggccu

SEQ ID NO: 3742 - RNA, 20 nt, Artificial Sequence
  SARM1 targeting guide sequence portion
cguggcaggcaucuuggagc

SEQ ID NO: 3743 - RNA, 20 nt, Artificial Sequence
  SARM1 targeting guide sequence portion
cguggcgcgcauugggcugg

SEQ ID NO: 3744 - RNA, 20 nt, Artificial Sequence
  SARM1 targeting guide sequence portion
cguuccuucgccagguucag

SEQ ID NO: 3745 - RNA, 20 nt, Artificial Sequence
  SARM1 targeting guide sequence portion
cguugcucgacucuaaccgc

SEQ ID NO: 3746 - RNA, 20 nt, Artificial Sequence
  SARM1 targeting guide sequence portion
cuaacaaggagguggagcgc

SEQ ID NO: 3747 - RNA, 20 nt, Artificial Sequence
  SARM1 targeting guide sequence portion
cuaaccgcuuggaggcgcag

SEQ ID NO: 3748 - RNA, 20 nt, Artificial Sequence
  SARM1 targeting guide sequence portion
cuaccaugcgucgcugcacc

SEQ ID NO: 3749 - RNA, 20 nt, Artificial Sequence
  SARM1 targeting guide sequence portion
cuaccucugcgccgaggcug

SEQ ID NO: 3750 - RNA, 20 nt, Artificial Sequence
  SARM1 targeting guide sequence portion
cuacggguucgcguuccuuc

SEQ ID NO: 3751 - RNA, 20 nt, Artificial Sequence
  SARM1 targeting guide sequence portion
cuacugcgaggcaggcgugc

SEQ ID NO: 3752 - RNA, 20 nt, Artificial Sequence
  SARM1 targeting guide sequence portion
cuccaagaugccugccacgc

SEQ ID NO: 3753 - RNA, 20 nt, Artificial Sequence
  SARM1 targeting guide sequence portion
cuccaagcgguuagagucga

SEQ ID NO: 3754 - RNA, 20 nt, Artificial Sequence
  SARM1 targeting guide sequence portion
cuccaaggaggacgagcugc

SEQ ID NO: 3755 - RNA, 20 nt, Artificial Sequence
  SARM1 targeting guide sequence portion
cuccaccuccuuguuagucg

SEQ ID NO: 3756 - RNA, 20 nt, Artificial Sequence
  SARM1 targeting guide sequence portion
cuccaccucgcgcuccaccu

SEQ ID NO: 3757 - RNA, 20 nt, Artificial Sequence
  SARM1 targeting guide sequence portion
cuccacgagcgccagcgugc

SEQ ID NO: 3758 - RNA, 20 nt, Artificial Sequence
  SARM1 targeting guide sequence portion
cuccgaaugcuugaacaugu

SEQ ID NO: 3759 - RNA, 20 nt, Artificial Sequence
  SARM1 targeting guide sequence portion
cuccgcgccagcucuacggg

SEQ ID NO: 3760 - RNA, 20 nt, Artificial Sequence
  SARM1 targeting guide sequence portion
cuccuccgaaugcuugaaca

SEQ ID NO: 3761 - RNA, 20 nt, Artificial Sequence
  SARM1 targeting guide sequence portion
cuccuuggagaaggcgagcg

SEQ ID NO: 3762 - RNA, 20 nt, Artificial Sequence
  SARM1 targeting guide sequence portion
cuccuuguuagucgccaaca

SEQ ID NO: 3763 - RNA, 20 nt, Artificial Sequence
  SARM1 targeting guide sequence portion
cucgacucuaaccgcuugga

SEQ ID NO: 3764 - RNA, 20 nt, Artificial Sequence
  SARM1 targeting guide sequence portion
cucgcaguagcgguguuggc

SEQ ID NO: 3765 - RNA, 20 nt, Artificial Sequence
  SARM1 targeting guide sequence portion
cucgccuucuccaaggagga

SEQ ID NO: 3766 - RNA, 20 nt, Artificial Sequence
  SARM1 targeting guide sequence portion
cucgcgcuccaccuccuugu

SEQ ID NO: 3767 - RNA, 20 nt, Artificial Sequence
  SARM1 targeting guide sequence portion
cucgcuggacccuggccgcu

SEQ ID NO: 3768 - RNA, 20 nt, Artificial Sequence
  SARM1 targeting guide sequence portion
cucggcgcagagguagaaag

SEQ ID NO: 3769 - RNA, 20 nt, Artificial Sequence
  SARM1 targeting guide sequence portion
cucggcugcgcgcuucucua

SEQ ID NO: 3770 - RNA, 20 nt, Artificial Sequence
  SARM1 targeting guide sequence portion
cucgggcacgcuggcgcucg

SEQ ID NO: 3771 - RNA, 20 nt, Artificial Sequence
  SARM1 targeting guide sequence portion
cucguccuccuuggagaagg

SEQ ID NO: 3772 - RNA, 20 nt, Artificial Sequence
  SARM1 targeting guide sequence portion
cucgugccguugcucgacuc

SEQ ID NO: 3773 - RNA, 20 nt, Artificial Sequence
  SARM1 targeting guide sequence portion
cucguggagccgcuuguggc

SEQ ID NO: 3774 - RNA, 20 nt, Artificial Sequence
  SARM1 targeting guide sequence portion
cucuaaccgcuuggaggcgc

SEQ ID NO: 3775 - RNA, 20 nt, Artificial Sequence
  SARM1 targeting guide sequence portion
cucuaccaugcgucgcugca

SEQ ID NO: 3776 - RNA, 20 nt, Artificial Sequence
  SARM1 targeting guide sequence portion
cucuacggguucgcguuccu

SEQ ID NO: 3777 - RNA, 20 nt, Artificial Sequence
  SARM1 targeting guide sequence portion
cucugcgccgaggcugccau

SEQ ID NO: 3778 - RNA, 20 nt, Artificial Sequence
  SARM1 targeting guide sequence portion
cucuggcaugucuccuccga

SEQ ID NO: 3779 - RNA, 20 nt, Artificial Sequence
  SARM1 targeting guide sequence portion
cucuucccgcucgccuucuc

SEQ ID NO: 3780 - RNA, 20 nt, Artificial Sequence
  SARM1 targeting guide sequence portion
cucuugauggcagccucggc

SEQ ID NO: 3781 - RNA, 20 nt, Artificial Sequence
  SARM1 targeting guide sequence portion
cugaaccuggcgaaggaacg

SEQ ID NO: 3782 - RNA, 20 nt, Artificial Sequence
  SARM1 targeting guide sequence portion
cugcaccgccuggcccccgu

SEQ ID NO: 3783 - RNA, 20 nt, Artificial Sequence
  SARM1 targeting guide sequence portion
cugcacgccugccucgcagu

SEQ ID NO: 3784 - RNA, 20 nt, Artificial Sequence
  SARM1 targeting guide sequence portion
cugcacgggggccaggcggu

SEQ ID NO: 3785 - RNA, 20 nt, Artificial Sequence
  SARM1 targeting guide sequence portion
cugcagcgccucgugccguu

SEQ ID NO: 3786 - RNA, 20 nt, Artificial Sequence
  SARM1 targeting guide sequence portion
cugcaggucgucgggcccgc

SEQ ID NO: 3787 - RNA, 20 nt, Artificial Sequence
  SARM1 targeting guide sequence portion
cugccacgcuccgcgccagc

SEQ ID NO: 3788 - RNA, 20 nt, Artificial Sequence
  SARM1 targeting guide sequence portion
cugccaucaagagccugcaa

SEQ ID NO: 3789 - RNA, 20 nt, Artificial Sequence
  SARM1 targeting guide sequence portion
cugccucgcaguagcggugu

SEQ ID NO: 3790 - RNA, 20 nt, Artificial Sequence
  SARM1 targeting guide sequence portion
cugcgaggcaggcgugcagc

SEQ ID NO: 3791 - RNA, 20 nt, Artificial Sequence
  SARM1 targeting guide sequence portion
cugcgccacugcgcgcuggc

SEQ ID NO: 3792 - RNA, 20 nt, Artificial Sequence
  SARM1 targeting guide sequence portion
cugcgccgaggcugccauca

SEQ ID NO: 3793 - RNA, 20 nt, Artificial Sequence
  SARM1 targeting guide sequence portion
cugcgccuccaagcgguuag

SEQ ID NO: 3794 - RNA, 20 nt, Artificial Sequence
  SARM1 targeting guide sequence portion
cugcgcgcugcacgggggcc

SEQ ID NO: 3795 - RNA, 20 nt, Artificial Sequence
  SARM1 targeting guide sequence portion
cugcgcgcuggcgcugggca

SEQ ID NO: 3796 - RNA, 20 nt, Artificial Sequence
  SARM1 targeting guide sequence portion
cugcgcgcuucucuaccaug

SEQ ID NO: 3797 - RNA, 20 nt, Artificial Sequence
  SARM1 targeting guide sequence portion
cugcugcgccacugcgcgcu

SEQ ID NO: 3798 - RNA, 20 nt, Artificial Sequence
  SARM1 targeting guide sequence portion
cugcuucggcugcacgccug

SEQ ID NO: 3799 - RNA, 20 nt, Artificial Sequence
  SARM1 targeting guide sequence portion
cuggacccuggccgcuucgc

SEQ ID NO: 3800 - RNA, 20 nt, Artificial Sequence
  SARM1 targeting guide sequence portion
cuggacgcggugcuguauug

SEQ ID NO: 3801 - RNA, 20 nt, Artificial Sequence
  SARM1 targeting guide sequence portion
cuggcaugucuccuccgaau

SEQ ID NO: 3802 - RNA, 20 nt, Artificial Sequence
  SARM1 targeting guide sequence portion
cuggcccccgugcagcgcgc

SEQ ID NO: 3803 - RNA, 20 nt, Artificial Sequence
  SARM1 targeting guide sequence portion
cuggccgcuucgcccgcugu

SEQ ID NO: 3804 - RNA, 20 nt, Artificial Sequence
  SARM1 targeting guide sequence portion
cuggcgaaggaacgcgaacc

SEQ ID NO: 3805 - RNA, 20 nt, Artificial Sequence
  SARM1 targeting guide sequence portion
cuggcgcggagcguggcagg

SEQ ID NO: 3806 - RNA, 20 nt, Artificial Sequence
  SARM1 targeting guide sequence portion
cuggcgcucguggagccgcu

SEQ ID NO: 3807 - RNA, 20 nt, Artificial Sequence
  SARM1 targeting guide sequence portion
cuggcgcugggcaacugcgc

SEQ ID NO: 3808 - RNA, 20 nt, Artificial Sequence
  SARM1 targeting guide sequence portion
cuggcguccaccagacagcg

SEQ ID NO: 3809 - RNA, 20 nt, Artificial Sequence
  SARM1 targeting guide sequence portion
cuggcuugugucgcuggcgu

SEQ ID NO: 3810 - RNA, 20 nt, Artificial Sequence
  SARM1 targeting guide sequence portion
cugggcaacugcgcgcugca

SEQ ID NO: 3811 - RNA, 20 nt, Artificial Sequence
  SARM1 targeting guide sequence portion
cugggcgugauccugaaccu

SEQ ID NO: 3812 - RNA, 20 nt, Artificial Sequence
  SARM1 targeting guide sequence portion
cugguggacgccagcgacac

SEQ ID NO: 3813 - RNA, 20 nt, Artificial Sequence
  SARM1 targeting guide sequence portion
cugguggcggccggcggccu

SEQ ID NO: 3814 - RNA, 20 nt, Artificial Sequence
  SARM1 targeting guide sequence portion
cuguauuggugccgccgcac

SEQ ID NO: 3815 - RNA, 20 nt, Artificial Sequence
  SARM1 targeting guide sequence portion
cugucugguggacgccagcg

SEQ ID NO: 3816 - RNA, 20 nt, Artificial Sequence
  SARM1 targeting guide sequence portion
cuucccgcucgccuucucca

SEQ ID NO: 3817 - RNA, 20 nt, Artificial Sequence
  SARM1 targeting guide sequence portion
cuucgccagguucaggauca

SEQ ID NO: 3818 - RNA, 20 nt, Artificial Sequence
  SARM1 targeting guide sequence portion
cuucgcccgcugucuggugg

SEQ ID NO: 3819 - RNA, 20 nt, Artificial Sequence
  SARM1 targeting guide sequence portion
cuucggcugcacgccugccu

SEQ ID NO: 3820 - RNA, 20 nt, Artificial Sequence
  SARM1 targeting guide sequence portion
cuucuccaaggaggacgagc

SEQ ID NO: 3821 - RNA, 20 nt, Artificial Sequence
  SARM1 targeting guide sequence portion
cuucucuaccaugcgucgcu

SEQ ID NO: 3822 - RNA, 20 nt, Artificial Sequence
  SARM1 targeting guide sequence portion
cuugaacaugugcuccaaga

SEQ ID NO: 3823 - RNA, 20 nt, Artificial Sequence
  SARM1 targeting guide sequence portion
cuugauggcagccucggcgc

SEQ ID NO: 3824 - RNA, 20 nt, Artificial Sequence
  SARM1 targeting guide sequence portion
cuugcaggcucuugauggca

SEQ ID NO: 3825 - RNA, 20 nt, Artificial Sequence
  SARM1 targeting guide sequence portion
cuugccuugcaggcucuuga

SEQ ID NO: 3826 - RNA, 20 nt, Artificial Sequence
  SARM1 targeting guide sequence portion
cuuggagaaggcgagcggga

SEQ ID NO: 3827 - RNA, 20 nt, Artificial Sequence
  SARM1 targeting guide sequence portion
cuuggagcacauguucaagc

SEQ ID NO: 3828 - RNA, 20 nt, Artificial Sequence
  SARM1 targeting guide sequence portion
cuuggaggcgcagugcaucg

SEQ ID NO: 3829 - RNA, 20 nt, Artificial Sequence
  SARM1 targeting guide sequence portion
cuuggucuugccuugcaggc

SEQ ID NO: 3830 - RNA, 20 nt, Artificial Sequence
  SARM1 targeting guide sequence portion
cuuguggccucgcuggaccc

SEQ ID NO: 3831 - RNA, 20 nt, Artificial Sequence
  SARM1 targeting guide sequence portion
cuugugucgcuggcguccac

SEQ ID NO: 3832 - RNA, 20 nt, Artificial Sequence
  SARM1 targeting guide sequence portion
cuuguuagucgccaacaccg

SEQ ID NO: 3833 - RNA, 20 nt, Artificial Sequence
  SARM1 targeting guide sequence portion
cuuucuaccucugcgccgag

SEQ ID NO: 3834 - RNA, 20 nt, Artificial Sequence
  SARM1 targeting guide sequence portion
gaaagccccgaugcacugcg

SEQ ID NO: 3835 - RNA, 20 nt, Artificial Sequence
  SARM1 targeting guide sequence portion
gaacaugugcuccaagaugc

SEQ ID NO: 3836 - RNA, 20 nt, Artificial Sequence
  SARM1 targeting guide sequence portion
gaacccguagagcuggcgcg

SEQ ID NO: 3837 - RNA, 20 nt, Artificial Sequence
  SARM1 targeting guide sequence portion
gaaccuggcgaaggaacgcg

SEQ ID NO: 3838 - RNA, 20 nt, Artificial Sequence
  SARM1 targeting guide sequence portion
gaacgcgaacccguagagcu

SEQ ID NO: 3839 - RNA, 20 nt, Artificial Sequence
  SARM1 targeting guide sequence portion
gaagagccacucggcugcgc

SEQ ID NO: 3840 - RNA, 20 nt, Artificial Sequence
  SARM1 targeting guide sequence portion
gaagcagcucguccuccuug

SEQ ID NO: 3841 - RNA, 20 nt, Artificial Sequence
  SARM1 targeting guide sequence portion
gaagcgcgcagccgaguggc

SEQ ID NO: 3842 - RNA, 20 nt, Artificial Sequence
  SARM1 targeting guide sequence portion
gaagcggccaggguccagcg

SEQ ID NO: 3843 - RNA, 20 nt, Artificial Sequence
  SARM1 targeting guide sequence portion
gaaggaacgcgaacccguag

SEQ ID NO: 3844 - RNA, 20 nt, Artificial Sequence
  SARM1 targeting guide sequence portion
gaaggcgagcgggaagagcc

SEQ ID NO: 3845 - RNA, 20 nt, Artificial Sequence
  SARM1 targeting guide sequence portion
gaaugcuugaacaugugcuc

SEQ ID NO: 3846 - RNA, 20 nt, Artificial Sequence
  SARM1 targeting guide sequence portion
gacacaagccagggccgcgg

SEQ ID NO: 3847 - RNA, 20 nt, Artificial Sequence
  SARM1 targeting guide sequence portion
gacagcgggcgaagcggcca

SEQ ID NO: 3848 - RNA, 20 nt, Artificial Sequence
  SARM1 targeting guide sequence portion
gacaugccagaggcuggugg

SEQ ID NO: 3849 - RNA, 20 nt, Artificial Sequence
  SARM1 targeting guide sequence portion
gaccccgcgcugcugcgcca

SEQ ID NO: 3850 - RNA, 20 nt, Artificial Sequence
  SARM1 targeting guide sequence portion
gacccuggccgcuucgcccg

SEQ ID NO: 3851 - RNA, 20 nt, Artificial Sequence
  SARM1 targeting guide sequence portion
gaccgcguggcgcgcauugg

SEQ ID NO: 3852 - RNA, 20 nt, Artificial Sequence
  SARM1 targeting guide sequence portion
gaccugcagcgccucgugcc

SEQ ID NO: 3853 - RNA, 20 nt, Artificial Sequence
  SARM1 targeting guide sequence portion
gacgaccugcagcgccucgu

SEQ ID NO: 3854 - RNA, 20 nt, Artificial Sequence
  SARM1 targeting guide sequence portion
gacgagcugcuucggcugca

SEQ ID NO: 3855 - RNA, 20 nt, Artificial Sequence
  SARM1 targeting guide sequence portion
gacgcaugguagagaagcgc

SEQ ID NO: 3856 - RNA, 20 nt, Artificial Sequence
  SARM1 targeting guide sequence portion
gacgccagcgacacaagcca

SEQ ID NO: 3857 - RNA, 20 nt, Artificial Sequence
  SARM1 targeting guide sequence portion
gacgcggugcuguauuggug

SEQ ID NO: 3858 - RNA, 20 nt, Artificial Sequence
  SARM1 targeting guide sequence portion
gacuaacaaggagguggagc

SEQ ID NO: 3859 - RNA, 20 nt, Artificial Sequence
  SARM1 targeting guide sequence portion
gacucuaaccgcuuggaggc

SEQ ID NO: 3860 - RNA, 20 nt, Artificial Sequence
  SARM1 targeting guide sequence portion
gagaagcgcgcagccgagug

SEQ ID NO: 3861 - RNA, 20 nt, Artificial Sequence
  SARM1 targeting guide sequence portion
gagaaggcgagcgggaagag

SEQ ID NO: 3862 - RNA, 20 nt, Artificial Sequence
  SARM1 targeting guide sequence portion
gagacaugccagaggcuggu

SEQ ID NO: 3863 - RNA, 20 nt, Artificial Sequence
  SARM1 targeting guide sequence portion
gagaccgcguggcgcgcauu

SEQ ID NO: 3864 - RNA, 20 nt, Artificial Sequence
  SARM1 targeting guide sequence portion
gagcaacggcacgaggcgcu

SEQ ID NO: 3865 - RNA, 20 nt, Artificial Sequence
  SARM1 targeting guide sequence portion
gagcacauguucaagcauuc

SEQ ID NO: 3866 - RNA, 20 nt, Artificial Sequence
  SARM1 targeting guide sequence portion
gagccacucggcugcgcgcu

SEQ ID NO: 3867 - RNA, 20 nt, Artificial Sequence
  SARM1 targeting guide sequence portion
gagccgcuuguggccucgcu

SEQ ID NO: 3868 - RNA, 20 nt, Artificial Sequence
  SARM1 targeting guide sequence portion
gagccugcaaggcaagacca

SEQ ID NO: 3869 - RNA, 20 nt, Artificial Sequence
  SARM1 targeting guide sequence portion
gagcgccagcgugcccgagc

SEQ ID NO: 3870 - RNA, 20 nt, Artificial Sequence
  SARM1 targeting guide sequence portion
gagcgcgagguggagcgcuc

SEQ ID NO: 3871 - RNA, 20 nt, Artificial Sequence
  SARM1 targeting guide sequence portion
gagcgcuccaccucgcgcuc

SEQ ID NO: 3872 - RNA, 20 nt, Artificial Sequence
  SARM1 targeting guide sequence portion
gagcgcucgggcacgcuggc

SEQ ID NO: 3873 - RNA, 20 nt, Artificial Sequence
  SARM1 targeting guide sequence portion
gagcgggaagagccacucgg

SEQ ID NO: 3874 - RNA, 20 nt, Artificial Sequence
  SARM1 targeting guide sequence portion
gagcguggcaggcaucuugg

SEQ ID NO: 3875 - RNA, 20 nt, Artificial Sequence
  SARM1 targeting guide sequence portion
gagcugcuucggcugcacgc

SEQ ID NO: 3876 - RNA, 20 nt, Artificial Sequence
  SARM1 targeting guide sequence portion
gagcuggcgcggagcguggc

SEQ ID NO: 3877 - RNA, 20 nt, Artificial Sequence
  SARM1 targeting guide sequence portion
gaggacgagcugcuucggcu

SEQ ID NO: 3878 - RNA, 20 nt, Artificial Sequence
  SARM1 targeting guide sequence portion
gaggagacaugccagaggcu

SEQ ID NO: 3879 - RNA, 20 nt, Artificial Sequence
  SARM1 targeting guide sequence portion
gaggcaggcgugcagccgaa

SEQ ID NO: 3880 - RNA, 20 nt, Artificial Sequence
  SARM1 targeting guide sequence portion
gaggccacaagcggcuccac

SEQ ID NO: 3881 - RNA, 20 nt, Artificial Sequence
  SARM1 targeting guide sequence portion
gaggcgcagugcaucggggc

SEQ ID NO: 3882 - RNA, 20 nt, Artificial Sequence
  SARM1 targeting guide sequence portion
gaggcgcugcaggucgucgg

SEQ ID NO: 3883 - RNA, 20 nt, Artificial Sequence
  SARM1 targeting guide sequence portion
gaggcugccaucaagagccu

SEQ ID NO: 3884 - RNA, 20 nt, Artificial Sequence
  SARM1 targeting guide sequence portion
gaggcugguggcggccggcg

SEQ ID NO: 3885 - RNA, 20 nt, Artificial Sequence
  SARM1 targeting guide sequence portion
gagguagaaagccccgaugc

SEQ ID NO: 3886 - RNA, 20 nt, Artificial Sequence
  SARM1 targeting guide sequence portion
gagguggagcgcgaggugga

SEQ ID NO: 3887 - RNA, 20 nt, Artificial Sequence
  SARM1 targeting guide sequence portion
gagguggagcgcucgggcac

SEQ ID NO: 3888 - RNA, 20 nt, Artificial Sequence
  SARM1 targeting guide sequence portion
gagucgagcaacggcacgag

SEQ ID NO: 3889 - RNA, 20 nt, Artificial Sequence
  SARM1 targeting guide sequence portion
gaguggcucuucccgcucgc

SEQ ID NO: 3890 - RNA, 20 nt, Artificial Sequence
  SARM1 targeting guide sequence portion
gaucacgcccagcccaaugc

SEQ ID NO: 3891 - RNA, 20 nt, Artificial Sequence
  SARM1 targeting guide sequence portion
gauccugaaccuggcgaagg

SEQ ID NO: 3892 - RNA, 20 nt, Artificial Sequence
  SARM1 targeting guide sequence portion
gaugcacugcgccuccaagc

SEQ ID NO: 3893 - RNA, 20 nt, Artificial Sequence
  SARM1 targeting guide sequence portion
gaugccugccacgcuccgcg

SEQ ID NO: 3894 - RNA, 20 nt, Artificial Sequence
  SARM1 targeting guide sequence portion
gauggcagccucggcgcaga

SEQ ID NO: 3895 - RNA, 20 nt, Artificial Sequence
  SARM1 targeting guide sequence portion
gcaacggcacgaggcgcugc

SEQ ID NO: 3896 - RNA, 20 nt, Artificial Sequence
  SARM1 targeting guide sequence portion
gcaacugcgcgcugcacggg

SEQ ID NO: 3897 - RNA, 20 nt, Artificial Sequence
  SARM1 targeting guide sequence portion
gcacauguucaagcauucgg

SEQ ID NO: 3898 - RNA, 20 nt, Artificial Sequence
  SARM1 targeting guide sequence portion
gcaccaauacagcaccgcgu

SEQ ID NO: 3899 - RNA, 20 nt, Artificial Sequence
  SARM1 targeting guide sequence portion
gcaccgccuggcccccgugc

SEQ ID NO: 3900 - RNA, 20 nt, Artificial Sequence
  SARM1 targeting guide sequence portion
gcacgaggcgcugcaggucg

SEQ ID NO: 3901 - RNA, 20 nt, Artificial Sequence
  SARM1 targeting guide sequence portion
gcacgccugccucgcaguag

SEQ ID NO: 3902 - RNA, 20 nt, Artificial Sequence
  SARM1 targeting guide sequence portion
gcacgcuggcgcucguggag

SEQ ID NO: 3903 - RNA, 20 nt, Artificial Sequence
  SARM1 targeting guide sequence portion
gcacggaccccgcgcugcug

SEQ ID NO: 3904 - RNA, 20 nt, Artificial Sequence
  SARM1 targeting guide sequence portion
gcacgggggccaggcggugc

SEQ ID NO: 3905 - RNA, 20 nt, Artificial Sequence
  SARM1 targeting guide sequence portion
gcacugcgccuccaagcggu

SEQ ID NO: 3906 - RNA, 20 nt, Artificial Sequence
  SARM1 targeting guide sequence portion
gcagagaccgcguggcgcgc

SEQ ID NO: 3907 - RNA, 20 nt, Artificial Sequence
  SARM1 targeting guide sequence portion
gcagagguagaaagccccga

SEQ ID NO: 3908 - RNA, 20 nt, Artificial Sequence
  SARM1 targeting guide sequence portion
gcagcagcgcgggguccgug

SEQ ID NO: 3909 - RNA, 20 nt, Artificial Sequence
  SARM1 targeting guide sequence portion
gcagccgaagcagcucgucc

SEQ ID NO: 3910 - RNA, 20 nt, Artificial Sequence
  SARM1 targeting guide sequence portion
gcagccgaguggcucuuccc

SEQ ID NO: 3911 - RNA, 20 nt, Artificial Sequence
  SARM1 targeting guide sequence portion
gcagccucggcgcagaggua

SEQ ID NO: 3912 - RNA, 20 nt, Artificial Sequence
  SARM1 targeting guide sequence portion
gcagcgacgcaugguagaga

SEQ ID NO: 3913 - RNA, 20 nt, Artificial Sequence
  SARM1 targeting guide sequence portion
gcagcgccucgugccguugc

SEQ ID NO: 3914 - RNA, 20 nt, Artificial Sequence
  SARM1 targeting guide sequence portion
gcagcgcgcaguugcccagc

SEQ ID NO: 3915 - RNA, 20 nt, Artificial Sequence
  SARM1 targeting guide sequence portion
gcagcgcgggguccgugcgg

SEQ ID NO: 3916 - RNA, 20 nt, Artificial Sequence
  SARM1 targeting guide sequence portion
gcagcucguccuccuuggag

SEQ ID NO: 3917 - RNA, 20 nt, Artificial Sequence
  SARM1 targeting guide sequence portion
gcaggcaucuuggagcacau

SEQ ID NO: 3918 - RNA, 20 nt, Artificial Sequence
  SARM1 targeting guide sequence portion
gcaggcgugcagccgaagca

SEQ ID NO: 3919 - RNA, 20 nt, Artificial Sequence
  SARM1 targeting guide sequence portion
gcaggcucuugauggcagcc

SEQ ID NO: 3920 - RNA, 20 nt, Artificial Sequence
  SARM1 targeting guide sequence portion
gcaggucgucgggcccgcgg

SEQ ID NO: 3921 - RNA, 20 nt, Artificial Sequence
  SARM1 targeting guide sequence portion
gcaguagcgguguuggcgac

SEQ ID NO: 3922 - RNA, 20 nt, Artificial Sequence
  SARM1 targeting guide sequence portion
gcagugcaucggggcuuucu

SEQ ID NO: 3923 - RNA, 20 nt, Artificial Sequence
  SARM1 targeting guide sequence portion
gcaguggcgcagcagcgcgg

SEQ ID NO: 3924 - RNA, 20 nt, Artificial Sequence
  SARM1 targeting guide sequence portion
gcaguugcccagcgccagcg

SEQ ID NO: 3925 - RNA, 20 nt, Artificial Sequence
  SARM1 targeting guide sequence portion
gcaucggggcuuucuaccuc

SEQ ID NO: 3926 - RNA, 20 nt, Artificial Sequence
  SARM1 targeting guide sequence portion
gcaucuuggagcacauguuc

SEQ ID NO: 3927 - RNA, 20 nt, Artificial Sequence
  SARM1 targeting guide sequence portion
gcaugguagagaagcgcgca

SEQ ID NO: 3928 - RNA, 20 nt, Artificial Sequence
  SARM1 targeting guide sequence portion
gcaugucuccuccgaaugcu

SEQ ID NO: 3929 - RNA, 20 nt, Artificial Sequence
  SARM1 targeting guide sequence portion
gcauucggaggagacaugcc

SEQ ID NO: 3930 - RNA, 20 nt, Artificial Sequence
  SARM1 targeting guide sequence portion
gcauugggcugggcgugauc

SEQ ID NO: 3931 - RNA, 20 nt, Artificial Sequence
  SARM1 targeting guide sequence portion
gccaacaccgcuacugcgag

SEQ ID NO: 3932 - RNA, 20 nt, Artificial Sequence
  SARM1 targeting guide sequence portion
gccacaagcggcuccacgag

SEQ ID NO: 3933 - RNA, 20 nt, Artificial Sequence
  SARM1 targeting guide sequence portion
gccaccagccucuggcaugu

SEQ ID NO: 3934 - RNA, 20 nt, Artificial Sequence
  SARM1 targeting guide sequence portion
gccacgcuccgcgccagcuc

SEQ ID NO: 3935 - RNA, 20 nt, Artificial Sequence
  SARM1 targeting guide sequence portion
gccacucggcugcgcgcuuc

SEQ ID NO: 3936 - RNA, 20 nt, Artificial Sequence
  SARM1 targeting guide sequence portion
gccacugcgcgcuggcgcug

SEQ ID NO: 3937 - RNA, 20 nt, Artificial Sequence
  SARM1 targeting guide sequence portion
gccagaggcugguggcggcc

SEQ ID NO: 3938 - RNA, 20 nt, Artificial Sequence
  SARM1 targeting guide sequence portion
gccagcgacacaagccaggg

SEQ ID NO: 3939 - RNA, 20 nt, Artificial Sequence
  SARM1 targeting guide sequence portion
gccagcgcgcaguggcgcag

SEQ ID NO: 3940 - RNA, 20 nt, Artificial Sequence
  SARM1 targeting guide sequence portion
gccagcgugcccgagcgcuc

SEQ ID NO: 3941 - RNA, 20 nt, Artificial Sequence
  SARM1 targeting guide sequence portion
gccagcucuacggguucgcg

SEQ ID NO: 3942 - RNA, 20 nt, Artificial Sequence
  SARM1 targeting guide sequence portion
gccaggcggugcagcgacgc

SEQ ID NO: 3943 - RNA, 20 nt, Artificial Sequence
  SARM1 targeting guide sequence portion
gccagggccgcgggcccgac

SEQ ID NO: 3944 - RNA, 20 nt, Artificial Sequence
  SARM1 targeting guide sequence portion
gccaggguccagcgaggcca

SEQ ID NO: 3945 - RNA, 20 nt, Artificial Sequence
  SARM1 targeting guide sequence portion
gccagguucaggaucacgcc

SEQ ID NO: 3946 - RNA, 20 nt, Artificial Sequence
  SARM1 targeting guide sequence portion
gccaucaagagccugcaagg

SEQ ID NO: 3947 - RNA, 20 nt, Artificial Sequence
  SARM1 targeting guide sequence portion
gcccaaugcgcgccacgcgg

SEQ ID NO: 3948 - RNA, 20 nt, Artificial Sequence
  SARM1 targeting guide sequence portion
gcccagcccaaugcgcgcca

SEQ ID NO: 3949 - RNA, 20 nt, Artificial Sequence
  SARM1 targeting guide sequence portion
gcccagcgccagcgcgcagu

SEQ ID NO: 3950 - RNA, 20 nt, Artificial Sequence
  SARM1 targeting guide sequence portion
gcccccgugcagcgcgcagu

SEQ ID NO: 3951 - RNA, 20 nt, Artificial Sequence
  SARM1 targeting guide sequence portion
gccccgaugcacugcgccuc

SEQ ID NO: 3952 - RNA, 20 nt, Artificial Sequence
  SARM1 targeting guide sequence portion
gcccgacgaccugcagcgcc

SEQ ID NO: 3953 - RNA, 20 nt, Artificial Sequence
  SARM1 targeting guide sequence portion
gcccgagcgcuccaccucgc

SEQ ID NO: 3954 - RNA, 20 nt, Artificial Sequence
  SARM1 targeting guide sequence portion
gcccgcggcccuggcuugug

SEQ ID NO: 3955 - RNA, 20 nt, Artificial Sequence
  SARM1 targeting guide sequence portion
gcccgcugucugguggacgc

SEQ ID NO: 3956 - RNA, 20 nt, Artificial Sequence
  SARM1 targeting guide sequence portion
gcccuggcuugugucgcugg

SEQ ID NO: 3957 - RNA, 20 nt, Artificial Sequence
  SARM1 targeting guide sequence portion
gccgaagcagcucguccucc

SEQ ID NO: 3958 - RNA, 20 nt, Artificial Sequence
  SARM1 targeting guide sequence portion
gccgaggcugccaucaagag

SEQ ID NO: 3959 - RNA, 20 nt, Artificial Sequence
  SARM1 targeting guide sequence portion
gccgaguggcucuucccgcu

SEQ ID NO: 3960 - RNA, 20 nt, Artificial Sequence
  SARM1 targeting guide sequence portion
gccgcacggaccccgcgcug

SEQ ID NO: 3961 - RNA, 20 nt, Artificial Sequence
  SARM1 targeting guide sequence portion
gccgccaccagccucuggca

SEQ ID NO: 3962 - RNA, 20 nt, Artificial Sequence
  SARM1 targeting guide sequence portion
gccgccgcacggaccccgcg

SEQ ID NO: 3963 - RNA, 20 nt, Artificial Sequence
  SARM1 targeting guide sequence portion
gccgccggccgccaccagcc

SEQ ID NO: 3964 - RNA, 20 nt, Artificial Sequence
  SARM1 targeting guide sequence portion
gccgcgggcccgacgaccug

SEQ ID NO: 3965 - RNA, 20 nt, Artificial Sequence
  SARM1 targeting guide sequence portion
gccgcuucgcccgcugucug

SEQ ID NO: 3966 - RNA, 20 nt, Artificial Sequence
  SARM1 targeting guide sequence portion
gccgcuuguggccucgcugg

SEQ ID NO: 3967 - RNA, 20 nt, Artificial Sequence
  SARM1 targeting guide sequence portion
gccggccgccaccagccucu

SEQ ID NO: 3968 - RNA, 20 nt, Artificial Sequence
  SARM1 targeting guide sequence portion
gccggcggccuggacgcggu

SEQ ID NO: 3969 - RNA, 20 nt, Artificial Sequence
  SARM1 targeting guide sequence portion
gccguugcucgacucuaacc

SEQ ID NO: 3970 - RNA, 20 nt, Artificial Sequence
  SARM1 targeting guide sequence portion
gccuccaagcgguuagaguc

SEQ ID NO: 3971 - RNA, 20 nt, Artificial Sequence
  SARM1 targeting guide sequence portion
gccucgcaguagcgguguug

SEQ ID NO: 3972 - RNA, 20 nt, Artificial Sequence
  SARM1 targeting guide sequence portion
gccucgcuggacccuggccg

SEQ ID NO: 3973 - RNA, 20 nt, Artificial Sequence
  SARM1 targeting guide sequence portion
gccucggcgcagagguagaa

SEQ ID NO: 3974 - RNA, 20 nt, Artificial Sequence
  SARM1 targeting guide sequence portion
gccucgugccguugcucgac

SEQ ID NO: 3975 - RNA, 20 nt, Artificial Sequence
  SARM1 targeting guide sequence portion
gccucuggcaugucuccucc

SEQ ID NO: 3976 - RNA, 20 nt, Artificial Sequence
  SARM1 targeting guide sequence portion
gccugcaaggcaagaccaag

SEQ ID NO: 3977 - RNA, 20 nt, Artificial Sequence
  SARM1 targeting guide sequence portion
gccugccacgcuccgcgcca

SEQ ID NO: 3978 - RNA, 20 nt, Artificial Sequence
  SARM1 targeting guide sequence portion
gccugccucgcaguagcggu

SEQ ID NO: 3979 - RNA, 20 nt, Artificial Sequence
  SARM1 targeting guide sequence portion
gccuggacgcggugcuguau

SEQ ID NO: 3980 - RNA, 20 nt, Artificial Sequence
  SARM1 targeting guide sequence portion
gccuggcccccgugcagcgc

SEQ ID NO: 3981 - RNA, 20 nt, Artificial Sequence
  SARM1 targeting guide sequence portion
gccuucuccaaggaggacga

SEQ ID NO: 3982 - RNA, 20 nt, Artificial Sequence
  SARM1 targeting guide sequence portion
gccuugcaggcucuugaugg

SEQ ID NO: 3983 - RNA, 20 nt, Artificial Sequence
  SARM1 targeting guide sequence portion
gcgaacccguagagcuggcg

SEQ ID NO: 3984 - RNA, 20 nt, Artificial Sequence
  SARM1 targeting guide sequence portion
gcgaagcggccaggguccag

SEQ ID NO: 3985 - RNA, 20 nt, Artificial Sequence
  SARM1 targeting guide sequence portion
gcgaaggaacgcgaacccgu

SEQ ID NO: 3986 - RNA, 20 nt, Artificial Sequence
  SARM1 targeting guide sequence portion
gcgacacaagccagggccgc

SEQ ID NO: 3987 - RNA, 20 nt, Artificial Sequence
  SARM1 targeting guide sequence portion
gcgacgcaugguagagaagc

SEQ ID NO: 3988 - RNA, 20 nt, Artificial Sequence
  SARM1 targeting guide sequence portion
gcgacuaacaaggaggugga

SEQ ID NO: 3989 - RNA, 20 nt, Artificial Sequence
  SARM1 targeting guide sequence portion
gcgagcgggaagagccacuc

SEQ ID NO: 3990 - RNA, 20 nt, Artificial Sequence
  SARM1 targeting guide sequence portion
gcgaggcaggcgugcagccg

SEQ ID NO: 3991 - RNA, 20 nt, Artificial Sequence
  SARM1 targeting guide sequence portion
gcgaggccacaagcggcucc

SEQ ID NO: 3992 - RNA, 20 nt, Artificial Sequence
  SARM1 targeting guide sequence portion
gcgagguggagcgcucgggc

SEQ ID NO: 3993 - RNA, 20 nt, Artificial Sequence
  SARM1 targeting guide sequence portion
gcgcagagguagaaagcccc

SEQ ID NO: 3994 - RNA, 20 nt, Artificial Sequence
  SARM1 targeting guide sequence portion
gcgcagcagcgcgggguccg

SEQ ID NO: 3995 - RNA, 20 nt, Artificial Sequence
  SARM1 targeting guide sequence portion
gcgcagccgaguggcucuuc

SEQ ID NO: 3996 - RNA, 20 nt, Artificial Sequence
  SARM1 targeting guide sequence portion
gcgcagugcaucggggcuuu

SEQ ID NO: 3997 - RNA, 20 nt, Artificial Sequence
  SARM1 targeting guide sequence portion
gcgcaguggcgcagcagcgc

SEQ ID NO: 3998 - RNA, 20 nt, Artificial Sequence
  SARM1 targeting guide sequence portion
gcgcaguugcccagcgccag

SEQ ID NO: 3999 - RNA, 20 nt, Artificial Sequence
  SARM1 targeting guide sequence portion
gcgcauugggcugggcguga

SEQ ID NO: 4000 - RNA, 20 nt, Artificial Sequence
  SARM1 targeting guide sequence portion
gcgccacugcgcgcuggcgc

SEQ ID NO: 4001 - RNA, 20 nt, Artificial Sequence
  SARM1 targeting guide sequence portion
gcgccagcgcgcaguggcgc

SEQ ID NO: 4002 - RNA, 20 nt, Artificial Sequence
  SARM1 targeting guide sequence portion
gcgccagcgugcccgagcgc

SEQ ID NO: 4003 - RNA, 20 nt, Artificial Sequence
  SARM1 targeting guide sequence portion
gcgccagcucuacggguucg

SEQ ID NO: 4004 - RNA, 20 nt, Artificial Sequence
  SARM1 targeting guide sequence portion
gcgccgaggcugccaucaag

SEQ ID NO: 4005 - RNA, 20 nt, Artificial Sequence
  SARM1 targeting guide sequence portion
gcgccuccaagcgguuagag

SEQ ID NO: 4006 - RNA, 20 nt, Artificial Sequence
  SARM1 targeting guide sequence portion
gcgccucgugccguugcucg

SEQ ID NO: 4007 - RNA, 20 nt, Artificial Sequence
  SARM1 targeting guide sequence portion
gcgcgagguggagcgcucgg

SEQ ID NO: 4008 - RNA, 20 nt, Artificial Sequence
  SARM1 targeting guide sequence portion
gcgcgcagccgaguggcucu

SEQ ID NO: 4009 - RNA, 20 nt, Artificial Sequence
  SARM1 targeting guide sequence portion
gcgcgcaguggcgcagcagc

SEQ ID NO: 4010 - RNA, 20 nt, Artificial Sequence
  SARM1 targeting guide sequence portion
gcgcgcaguugcccagcgcc

SEQ ID NO: 4011 - RNA, 20 nt, Artificial Sequence
  SARM1 targeting guide sequence portion
gcgcgcauugggcugggcgu

SEQ ID NO: 4012 - RNA, 20 nt, Artificial Sequence
  SARM1 targeting guide sequence portion
gcgcgcugcacgggggccag

SEQ ID NO: 4013 - RNA, 20 nt, Artificial Sequence
  SARM1 targeting guide sequence portion
gcgcgcuggcgcugggcaac

SEQ ID NO: 4014 - RNA, 20 nt, Artificial Sequence
  SARM1 targeting guide sequence portion
gcgcgcuucucuaccaugcg

SEQ ID NO: 4015 - RNA, 20 nt, Artificial Sequence
  SARM1 targeting guide sequence portion
gcgcggagcguggcaggcau

SEQ ID NO: 4016 - RNA, 20 nt, Artificial Sequence
  SARM1 targeting guide sequence portion
gcgcgggguccgugcggcgg

SEQ ID NO: 4017 - RNA, 20 nt, Artificial Sequence
  SARM1 targeting guide sequence portion
gcgcuccaccuccuuguuag

SEQ ID NO: 4018 - RNA, 20 nt, Artificial Sequence
  SARM1 targeting guide sequence portion
gcgcuccaccucgcgcucca

SEQ ID NO: 4019 - RNA, 20 nt, Artificial Sequence
  SARM1 targeting guide sequence portion
gcgcucgggcacgcuggcgc

SEQ ID NO: 4020 - RNA, 20 nt, Artificial Sequence
  SARM1 targeting guide sequence portion
gcgcucguggagccgcuugu

SEQ ID NO: 4021 - RNA, 20 nt, Artificial Sequence
  SARM1 targeting guide sequence portion
gcgcugcacgggggccaggc

SEQ ID NO: 4022 - RNA, 20 nt, Artificial Sequence
  SARM1 targeting guide sequence portion
gcgcugcaggucgucgggcc

SEQ ID NO: 4023 - RNA, 20 nt, Artificial Sequence
  SARM1 targeting guide sequence portion
gcgcugcugcgccacugcgc

SEQ ID NO: 4024 - RNA, 20 nt, Artificial Sequence
  SARM1 targeting guide sequence portion
gcgcuggcgcugggcaacug

SEQ ID NO: 4025 - RNA, 20 nt, Artificial Sequence
  SARM1 targeting guide sequence portion
gcgcugggcaacugcgcgcu

SEQ ID NO: 4026 - RNA, 20 nt, Artificial Sequence
  SARM1 targeting guide sequence portion
gcgcuucucuaccaugcguc

SEQ ID NO: 4027 - RNA, 20 nt, Artificial Sequence
  SARM1 targeting guide sequence portion
gcggagcguggcaggcaucu

SEQ ID NO: 4028 - RNA, 20 nt, Artificial Sequence
  SARM1 targeting guide sequence portion
gcggcaccaauacagcaccg

SEQ ID NO: 4029 - RNA, 20 nt, Artificial Sequence
  SARM1 targeting guide sequence portion
gcggccaggguccagcgagg

SEQ ID NO: 4030 - RNA, 20 nt, Artificial Sequence
  SARM1 targeting guide sequence portion
gcggcccuggcuugugucgc

SEQ ID NO: 4031 - RNA, 20 nt, Artificial Sequence
  SARM1 targeting guide sequence portion
gcggccggcggccuggacgc

SEQ ID NO: 4032 - RNA, 20 nt, Artificial Sequence
  SARM1 targeting guide sequence portion
gcggccuggacgcggugcug

SEQ ID NO: 4033 - RNA, 20 nt, Artificial Sequence
  SARM1 targeting guide sequence portion
gcggcggcaccaauacagca

SEQ ID NO: 4034 - RNA, 20 nt, Artificial Sequence
  SARM1 targeting guide sequence portion
gcggcuccacgagcgccagc

SEQ ID NO: 4035 - RNA, 20 nt, Artificial Sequence
  SARM1 targeting guide sequence portion
gcgggaagagccacucggcu

SEQ ID NO: 4036 - RNA, 20 nt, Artificial Sequence
  SARM1 targeting guide sequence portion
gcgggcccgacgaccugcag

SEQ ID NO: 4037 - RNA, 20 nt, Artificial Sequence
  SARM1 targeting guide sequence portion
gcgggcgaagcggccagggu

SEQ ID NO: 4038 - RNA, 20 nt, Artificial Sequence
  SARM1 targeting guide sequence portion
gcgggguccgugcggcggca

SEQ ID NO: 4039 - RNA, 20 nt, Artificial Sequence
  SARM1 targeting guide sequence portion
gcggugcagcgacgcauggu

SEQ ID NO: 4040 - RNA, 20 nt, Artificial Sequence
  SARM1 targeting guide sequence portion
gcggugcuguauuggugccg

SEQ ID NO: 4041 - RNA, 20 nt, Artificial Sequence
  SARM1 targeting guide sequence portion
gcgguguuggcgacuaacaa

SEQ ID NO: 4042 - RNA, 20 nt, Artificial Sequence
  SARM1 targeting guide sequence portion
gcgguuagagucgagcaacg

SEQ ID NO: 4043 - RNA, 20 nt, Artificial Sequence
  SARM1 targeting guide sequence portion
gcguccaccagacagcgggc

SEQ ID NO: 4044 - RNA, 20 nt, Artificial Sequence
  SARM1 targeting guide sequence portion
gcguccaggccgccggccgc

SEQ ID NO: 4045 - RNA, 20 nt, Artificial Sequence
  SARM1 targeting guide sequence portion
gcgucgcugcaccgccuggc

SEQ ID NO: 4046 - RNA, 20 nt, Artificial Sequence
  SARM1 targeting guide sequence portion
gcgugauccugaaccuggcg

SEQ ID NO: 4047 - RNA, 20 nt, Artificial Sequence
  SARM1 targeting guide sequence portion
gcgugcagccgaagcagcuc

SEQ ID NO: 4048 - RNA, 20 nt, Artificial Sequence
  SARM1 targeting guide sequence portion
gcgugcccgagcgcuccacc

SEQ ID NO: 4049 - RNA, 20 nt, Artificial Sequence
  SARM1 targeting guide sequence portion
gcguggcaggcaucuuggag

SEQ ID NO: 4050 - RNA, 20 nt, Artificial Sequence
  SARM1 targeting guide sequence portion
gcguggcgcgcauugggcug

SEQ ID NO: 4051 - RNA, 20 nt, Artificial Sequence
  SARM1 targeting guide sequence portion
gcguuccuucgccagguuca

SEQ ID NO: 4052 - RNA, 20 nt, Artificial Sequence
  SARM1 targeting guide sequence portion
gcuacugcgaggcaggcgug

SEQ ID NO: 4053 - RNA, 20 nt, Artificial Sequence
  SARM1 targeting guide sequence portion
gcuccaagaugccugccacg

SEQ ID NO: 4054 - RNA, 20 nt, Artificial Sequence
  SARM1 targeting guide sequence portion
gcuccaccuccuuguuaguc

SEQ ID NO: 4055 - RNA, 20 nt, Artificial Sequence
  SARM1 targeting guide sequence portion
gcuccaccucgcgcuccacc

SEQ ID NO: 4056 - RNA, 20 nt, Artificial Sequence
  SARM1 targeting guide sequence portion
gcuccacgagcgccagcgug

SEQ ID NO: 4057 - RNA, 20 nt, Artificial Sequence
  SARM1 targeting guide sequence portion
gcuccgcgccagcucuacgg

SEQ ID NO: 4058 - RNA, 20 nt, Artificial Sequence
  SARM1 targeting guide sequence portion
gcucgacucuaaccgcuugg

SEQ ID NO: 4059 - RNA, 20 nt, Artificial Sequence
  SARM1 targeting guide sequence portion
gcucgccuucuccaaggagg

SEQ ID NO: 4060 - RNA, 20 nt, Artificial Sequence
  SARM1 targeting guide sequence portion
gcucgggcacgcuggcgcuc

SEQ ID NO: 4061 - RNA, 20 nt, Artificial Sequence
  SARM1 targeting guide sequence portion
gcucguccuccuuggagaag

SEQ ID NO: 4062 - RNA, 20 nt, Artificial Sequence
  SARM1 targeting guide sequence portion
gcucguggagccgcuugugg

SEQ ID NO: 4063 - RNA, 20 nt, Artificial Sequence
  SARM1 targeting guide sequence portion
gcucuacggguucgcguucc

SEQ ID NO: 4064 - RNA, 20 nt, Artificial Sequence
  SARM1 targeting guide sequence portion
gcucuucccgcucgccuucu

SEQ ID NO: 4065 - RNA, 20 nt, Artificial Sequence
  SARM1 targeting guide sequence portion
gcucuugauggcagccucgg

SEQ ID NO: 4066 - RNA, 20 nt, Artificial Sequence
  SARM1 targeting guide sequence portion
gcugcaccgccuggcccccg

SEQ ID NO: 4067 - RNA, 20 nt, Artificial Sequence
  SARM1 targeting guide sequence portion
gcugcacgccugccucgcag

SEQ ID NO: 4068 - RNA, 20 nt, Artificial Sequence
  SARM1 targeting guide sequence portion
gcugcacgggggccaggcgg

SEQ ID NO: 4069 - RNA, 20 nt, Artificial Sequence
  SARM1 targeting guide sequence portion
gcugcaggucgucgggcccg

SEQ ID NO: 4070 - RNA, 20 nt, Artificial Sequence
  SARM1 targeting guide sequence portion
gcugccaucaagagccugca

SEQ ID NO: 4071 - RNA, 20 nt, Artificial Sequence
  SARM1 targeting guide sequence portion
gcugcgccacugcgcgcugg

SEQ ID NO: 4072 - RNA, 20 nt, Artificial Sequence
  SARM1 targeting guide sequence portion
gcugcgcgcuucucuaccau

SEQ ID NO: 4073 - RNA, 20 nt, Artificial Sequence
  SARM1 targeting guide sequence portion
gcugcugcgccacugcgcgc

SEQ ID NO: 4074 - RNA, 20 nt, Artificial Sequence
  SARM1 targeting guide sequence portion
gcugcuucggcugcacgccu

SEQ ID NO: 4075 - RNA, 20 nt, Artificial Sequence
  SARM1 targeting guide sequence portion
gcuggacccuggccgcuucg

SEQ ID NO: 4076 - RNA, 20 nt, Artificial Sequence
  SARM1 targeting guide sequence portion
gcuggcgcggagcguggcag

SEQ ID NO: 4077 - RNA, 20 nt, Artificial Sequence
  SARM1 targeting guide sequence portion
gcuggcgcucguggagccgc

SEQ ID NO: 4078 - RNA, 20 nt, Artificial Sequence
  SARM1 targeting guide sequence portion
gcuggcgcugggcaacugcg

SEQ ID NO: 4079 - RNA, 20 nt, Artificial Sequence
  SARM1 targeting guide sequence portion
gcuggcguccaccagacagc

SEQ ID NO: 4080 - RNA, 20 nt, Artificial Sequence
  SARM1 targeting guide sequence portion
gcugggcaacugcgcgcugc

SEQ ID NO: 4081 - RNA, 20 nt, Artificial Sequence
  SARM1 targeting guide sequence portion
gcugggcgugauccugaacc

SEQ ID NO: 4082 - RNA, 20 nt, Artificial Sequence
  SARM1 targeting guide sequence portion
gcugguggcggccggcggcc

SEQ ID NO: 4083 - RNA, 20 nt, Artificial Sequence
  SARM1 targeting guide sequence portion
gcuguauuggugccgccgca

SEQ ID NO: 4084 - RNA, 20 nt, Artificial Sequence
  SARM1 targeting guide sequence portion
gcugucugguggacgccagc

SEQ ID NO: 4085 - RNA, 20 nt, Artificial Sequence
  SARM1 targeting guide sequence portion
gcuucgcccgcugucuggug

SEQ ID NO: 4086 - RNA, 20 nt, Artificial Sequence
  SARM1 targeting guide sequence portion
gcuucggcugcacgccugcc

SEQ ID NO: 4087 - RNA, 20 nt, Artificial Sequence
  SARM1 targeting guide sequence portion
gcuucucuaccaugcgucgc

SEQ ID NO: 4088 - RNA, 20 nt, Artificial Sequence
  SARM1 targeting guide sequence portion
gcuugaacaugugcuccaag

SEQ ID NO: 4089 - RNA, 20 nt, Artificial Sequence
  SARM1 targeting guide sequence portion
gcuuggaggcgcagugcauc

SEQ ID NO: 4090 - RNA, 20 nt, Artificial Sequence
  SARM1 targeting guide sequence portion
gcuuguggccucgcuggacc

SEQ ID NO: 4091 - RNA, 20 nt, Artificial Sequence
  SARM1 targeting guide sequence portion
gcuugugucgcuggcgucca

SEQ ID NO: 4092 - RNA, 20 nt, Artificial Sequence
  SARM1 targeting guide sequence portion
gcuuucuaccucugcgccga

SEQ ID NO: 4093 - RNA, 20 nt, Artificial Sequence
  SARM1 targeting guide sequence portion
ggaacgcgaacccguagagc

SEQ ID NO: 4094 - RNA, 20 nt, Artificial Sequence
  SARM1 targeting guide sequence portion
ggaagagccacucggcugcg

SEQ ID NO: 4095 - RNA, 20 nt, Artificial Sequence
  SARM1 targeting guide sequence portion
ggaccccgcgcugcugcgcc

SEQ ID NO: 4096 - RNA, 20 nt, Artificial Sequence
  SARM1 targeting guide sequence portion
ggacccuggccgcuucgccc

SEQ ID NO: 4097 - RNA, 20 nt, Artificial Sequence
  SARM1 targeting guide sequence portion
ggacgagcugcuucggcugc

SEQ ID NO: 4098 - RNA, 20 nt, Artificial Sequence
  SARM1 targeting guide sequence portion
ggacgccagcgacacaagcc

SEQ ID NO: 4099 - RNA, 20 nt, Artificial Sequence
  SARM1 targeting guide sequence portion
ggacgcggugcuguauuggu

SEQ ID NO: 4100 - RNA, 20 nt, Artificial Sequence
  SARM1 targeting guide sequence portion
ggagaaggcgagcgggaaga

SEQ ID NO: 4101 - RNA, 20 nt, Artificial Sequence
  SARM1 targeting guide sequence portion
ggagacaugccagaggcugg

SEQ ID NO: 4102 - RNA, 20 nt, Artificial Sequence
  SARM1 targeting guide sequence portion
ggagcacauguucaagcauu

SEQ ID NO: 4103 - RNA, 20 nt, Artificial Sequence
  SARM1 targeting guide sequence portion
ggagccgcuuguggccucgc

SEQ ID NO: 4104 - RNA, 20 nt, Artificial Sequence
  SARM1 targeting guide sequence portion
ggagcgcgagguggagcgcu

SEQ ID NO: 4105 - RNA, 20 nt, Artificial Sequence
  SARM1 targeting guide sequence portion
ggagcgcucgggcacgcugg

SEQ ID NO: 4106 - RNA, 20 nt, Artificial Sequence
  SARM1 targeting guide sequence portion
ggagcguggcaggcaucuug

SEQ ID NO: 4107 - RNA, 20 nt, Artificial Sequence
  SARM1 targeting guide sequence portion
ggaggacgagcugcuucggc

SEQ ID NO: 4108 - RNA, 20 nt, Artificial Sequence
  SARM1 targeting guide sequence portion
ggaggagacaugccagaggc

SEQ ID NO: 4109 - RNA, 20 nt, Artificial Sequence
  SARM1 targeting guide sequence portion
ggaggcgcagugcaucgggg

SEQ ID NO: 4110 - RNA, 20 nt, Artificial Sequence
  SARM1 targeting guide sequence portion
ggagguggagcgcgaggugg

SEQ ID NO: 4111 - RNA, 20 nt, Artificial Sequence
  SARM1 targeting guide sequence portion
ggaucacgcccagcccaaug

SEQ ID NO: 4112 - RNA, 20 nt, Artificial Sequence
  SARM1 targeting guide sequence portion
ggcaacugcgcgcugcacgg

SEQ ID NO: 4113 - RNA, 20 nt, Artificial Sequence
  SARM1 targeting guide sequence portion
ggcaccaauacagcaccgcg

SEQ ID NO: 4114 - RNA, 20 nt, Artificial Sequence
  SARM1 targeting guide sequence portion
ggcacgaggcgcugcagguc

SEQ ID NO: 4115 - RNA, 20 nt, Artificial Sequence
  SARM1 targeting guide sequence portion
ggcacgcuggcgcucgugga

SEQ ID NO: 4116 - RNA, 20 nt, Artificial Sequence
  SARM1 targeting guide sequence portion
ggcagagaccgcguggcgcg

SEQ ID NO: 4117 - RNA, 20 nt, Artificial Sequence
  SARM1 targeting guide sequence portion
ggcagccucggcgcagaggu

SEQ ID NO: 4118 - RNA, 20 nt, Artificial Sequence
  SARM1 targeting guide sequence portion
ggcaggcaucuuggagcaca

SEQ ID NO: 4119 - RNA, 20 nt, Artificial Sequence
  SARM1 targeting guide sequence portion
ggcaggcgugcagccgaagc

SEQ ID NO: 4120 - RNA, 20 nt, Artificial Sequence
  SARM1 targeting guide sequence portion
ggcaucuuggagcacauguu

SEQ ID NO: 4121 - RNA, 20 nt, Artificial Sequence
  SARM1 targeting guide sequence portion
ggcaugucuccuccgaaugc

SEQ ID NO: 4122 - RNA, 20 nt, Artificial Sequence
  SARM1 targeting guide sequence portion
ggccacaagcggcuccacga

SEQ ID NO: 4123 - RNA, 20 nt, Artificial Sequence
  SARM1 targeting guide sequence portion
ggccaggcggugcagcgacg

SEQ ID NO: 4124 - RNA, 20 nt, Artificial Sequence
  SARM1 targeting guide sequence portion
ggccaggguccagcgaggcc

SEQ ID NO: 4125 - RNA, 20 nt, Artificial Sequence
  SARM1 targeting guide sequence portion
ggcccccgugcagcgcgcag

SEQ ID NO: 4126 - RNA, 20 nt, Artificial Sequence
  SARM1 targeting guide sequence portion
ggcccgacgaccugcagcgc

SEQ ID NO: 4127 - RNA, 20 nt, Artificial Sequence
  SARM1 targeting guide sequence portion
ggcccgcggcccuggcuugu

SEQ ID NO: 4128 - RNA, 20 nt, Artificial Sequence
  SARM1 targeting guide sequence portion
ggcccuggcuugugucgcug

SEQ ID NO: 4129 - RNA, 20 nt, Artificial Sequence
  SARM1 targeting guide sequence portion
ggccgccaccagccucuggc

SEQ ID NO: 4130 - RNA, 20 nt, Artificial Sequence
  SARM1 targeting guide sequence portion
ggccgccggccgccaccagc

SEQ ID NO: 4131 - RNA, 20 nt, Artificial Sequence
  SARM1 targeting guide sequence portion
ggccgcgggcccgacgaccu

SEQ ID NO: 4132 - RNA, 20 nt, Artificial Sequence
  SARM1 targeting guide sequence portion
ggccgcuucgcccgcugucu

SEQ ID NO: 4133 - RNA, 20 nt, Artificial Sequence
  SARM1 targeting guide sequence portion
ggccggcggccuggacgcgg

SEQ ID NO: 4134 - RNA, 20 nt, Artificial Sequence
  SARM1 targeting guide sequence portion
ggccucgcuggacccuggcc

SEQ ID NO: 4135 - RNA, 20 nt, Artificial Sequence
  SARM1 targeting guide sequence portion
ggccuggacgcggugcugua

SEQ ID NO: 4136 - RNA, 20 nt, Artificial Sequence
  SARM1 targeting guide sequence portion
ggcgaagcggccagggucca

SEQ ID NO: 4137 - RNA, 20 nt, Artificial Sequence
  SARM1 targeting guide sequence portion
ggcgaaggaacgcgaacccg

SEQ ID NO: 4138 - RNA, 20 nt, Artificial Sequence
  SARM1 targeting guide sequence portion
ggcgacuaacaaggaggugg

SEQ ID NO: 4139 - RNA, 20 nt, Artificial Sequence
  SARM1 targeting guide sequence portion
ggcgagcgggaagagccacu

SEQ ID NO: 4140 - RNA, 20 nt, Artificial Sequence
  SARM1 targeting guide sequence portion
ggcgcagagguagaaagccc

SEQ ID NO: 4141 - RNA, 20 nt, Artificial Sequence
  SARM1 targeting guide sequence portion
ggcgcagcagcgcggggucc

SEQ ID NO: 4142 - RNA, 20 nt, Artificial Sequence
  SARM1 targeting guide sequence portion
ggcgcagugcaucggggcuu

SEQ ID NO: 4143 - RNA, 20 nt, Artificial Sequence
  SARM1 targeting guide sequence portion
ggcgcgcauugggcugggcg

SEQ ID NO: 4144 - RNA, 20 nt, Artificial Sequence
  SARM1 targeting guide sequence portion
ggcgcggagcguggcaggca

SEQ ID NO: 4145 - RNA, 20 nt, Artificial Sequence
  SARM1 targeting guide sequence portion
ggcgcucguggagccgcuug

SEQ ID NO: 4146 - RNA, 20 nt, Artificial Sequence
  SARM1 targeting guide sequence portion
ggcgcugcaggucgucgggc

SEQ ID NO: 4147 - RNA, 20 nt, Artificial Sequence
  SARM1 targeting guide sequence portion
ggcgcugggcaacugcgcgc

SEQ ID NO: 4148 - RNA, 20 nt, Artificial Sequence
  SARM1 targeting guide sequence portion
ggcggcaccaauacagcacc

SEQ ID NO: 4149 - RNA, 20 nt, Artificial Sequence
  SARM1 targeting guide sequence portion
ggcggccuggacgcggugcu

SEQ ID NO: 4150 - RNA, 20 nt, Artificial Sequence
  SARM1 targeting guide sequence portion
ggcggugcagcgacgcaugg

SEQ ID NO: 4151 - RNA, 20 nt, Artificial Sequence
  SARM1 targeting guide sequence portion
ggcguccaccagacagcggg

SEQ ID NO: 4152 - RNA, 20 nt, Artificial Sequence
  SARM1 targeting guide sequence portion
ggcgugauccugaaccuggc

SEQ ID NO: 4153 - RNA, 20 nt, Artificial Sequence
  SARM1 targeting guide sequence portion
ggcgugcagccgaagcagcu

SEQ ID NO: 4154 - RNA, 20 nt, Artificial Sequence
  SARM1 targeting guide sequence portion
ggcuccacgagcgccagcgu

SEQ ID NO: 4155 - RNA, 20 nt, Artificial Sequence
  SARM1 targeting guide sequence portion
ggcucuucccgcucgccuuc

SEQ ID NO: 4156 - RNA, 20 nt, Artificial Sequence
  SARM1 targeting guide sequence portion
ggcucuugauggcagccucg

SEQ ID NO: 4157 - RNA, 20 nt, Artificial Sequence
  SARM1 targeting guide sequence portion
ggcugcacgccugccucgca

SEQ ID NO: 4158 - RNA, 20 nt, Artificial Sequence
  SARM1 targeting guide sequence portion
ggcugccaucaagagccugc

SEQ ID NO: 4159 - RNA, 20 nt, Artificial Sequence
  SARM1 targeting guide sequence portion
ggcugcgcgcuucucuacca

SEQ ID NO: 4160 - RNA, 20 nt, Artificial Sequence
  SARM1 targeting guide sequence portion
ggcugggcgugauccugaac

SEQ ID NO: 4161 - RNA, 20 nt, Artificial Sequence
  SARM1 targeting guide sequence portion
ggcugguggcggccggcggc

SEQ ID NO: 4162 - RNA, 20 nt, Artificial Sequence
  SARM1 targeting guide sequence portion
ggcuugugucgcuggcgucc

SEQ ID NO: 4163 - RNA, 20 nt, Artificial Sequence
  SARM1 targeting guide sequence portion
ggcuuucuaccucugcgccg

SEQ ID NO: 4164 - RNA, 20 nt, Artificial Sequence
  SARM1 targeting guide sequence portion
gggaagagccacucggcugc

SEQ ID NO: 4165 - RNA, 20 nt, Artificial Sequence
  SARM1 targeting guide sequence portion
gggcaacugcgcgcugcacg

SEQ ID NO: 4166 - RNA, 20 nt, Artificial Sequence
  SARM1 targeting guide sequence portion
gggcacgcuggcgcucgugg

SEQ ID NO: 4167 - RNA, 20 nt, Artificial Sequence
  SARM1 targeting guide sequence portion
gggcagagaccgcguggcgc

SEQ ID NO: 4168 - RNA, 20 nt, Artificial Sequence
  SARM1 targeting guide sequence portion
gggccaggcggugcagcgac

SEQ ID NO: 4169 - RNA, 20 nt, Artificial Sequence
  SARM1 targeting guide sequence portion
gggcccgacgaccugcagcg

SEQ ID NO: 4170 - RNA, 20 nt, Artificial Sequence
  SARM1 targeting guide sequence portion
gggcccgcggcccuggcuug

SEQ ID NO: 4171 - RNA, 20 nt, Artificial Sequence
  SARM1 targeting guide sequence portion
gggccgcgggcccgacgacc

SEQ ID NO: 4172 - RNA, 20 nt, Artificial Sequence
  SARM1 targeting guide sequence portion
gggcgaagcggccagggucc

SEQ ID NO: 4173 - RNA, 20 nt, Artificial Sequence
  SARM1 targeting guide sequence portion
gggcgugauccugaaccugg

SEQ ID NO: 4174 - RNA, 20 nt, Artificial Sequence
  SARM1 targeting guide sequence portion
gggcugggcgugauccugaa

SEQ ID NO: 4175 - RNA, 20 nt, Artificial Sequence
  SARM1 targeting guide sequence portion
gggcuuucuaccucugcgcc

SEQ ID NO: 4176 - RNA, 20 nt, Artificial Sequence
  SARM1 targeting guide sequence portion
ggggccaggcggugcagcga

SEQ ID NO: 4177 - RNA, 20 nt, Artificial Sequence
  SARM1 targeting guide sequence portion
ggggcuuucuaccucugcgc

SEQ ID NO: 4178 - RNA, 20 nt, Artificial Sequence
  SARM1 targeting guide sequence portion
gggggccaggcggugcagcg

SEQ ID NO: 4179 - RNA, 20 nt, Artificial Sequence
  SARM1 targeting guide sequence portion
gggguccgugcggcggcacc

SEQ ID NO: 4180 - RNA, 20 nt, Artificial Sequence
  SARM1 targeting guide sequence portion
ggguccagcgaggccacaag

SEQ ID NO: 4181 - RNA, 20 nt, Artificial Sequence
  SARM1 targeting guide sequence portion
ggguccgugcggcggcacca

SEQ ID NO: 4182 - RNA, 20 nt, Artificial Sequence
  SARM1 targeting guide sequence portion
ggguucgcguuccuucgcca

SEQ ID NO: 4183 - RNA, 20 nt, Artificial Sequence
  SARM1 targeting guide sequence portion
gguagaaagccccgaugcac

SEQ ID NO: 4184 - RNA, 20 nt, Artificial Sequence
  SARM1 targeting guide sequence portion
gguagagaagcgcgcagccg

SEQ ID NO: 4185 - RNA, 20 nt, Artificial Sequence
  SARM1 targeting guide sequence portion
gguccagcgaggccacaagc

SEQ ID NO: 4186 - RNA, 20 nt, Artificial Sequence
  SARM1 targeting guide sequence portion
gguccgugcggcggcaccaa

SEQ ID NO: 4187 - RNA, 20 nt, Artificial Sequence
  SARM1 targeting guide sequence portion
ggucgucgggcccgcggccc

SEQ ID NO: 4188 - RNA, 20 nt, Artificial Sequence
  SARM1 targeting guide sequence portion
ggucuugccuugcaggcucu

SEQ ID NO: 4189 - RNA, 20 nt, Artificial Sequence
  SARM1 targeting guide sequence portion
ggugcagcgacgcaugguag

SEQ ID NO: 4190 - RNA, 20 nt, Artificial Sequence
  SARM1 targeting guide sequence portion
ggugccgccgcacggacccc

SEQ ID NO: 4191 - RNA, 20 nt, Artificial Sequence
  SARM1 targeting guide sequence portion
ggugcuguauuggugccgcc

SEQ ID NO: 4192 - RNA, 20 nt, Artificial Sequence
  SARM1 targeting guide sequence portion
gguggacgccagcgacacaa

SEQ ID NO: 4193 - RNA, 20 nt, Artificial Sequence
  SARM1 targeting guide sequence portion
gguggagcgcgagguggagc

SEQ ID NO: 4194 - RNA, 20 nt, Artificial Sequence
  SARM1 targeting guide sequence portion
gguggagcgcucgggcacgc

SEQ ID NO: 4195 - RNA, 20 nt, Artificial Sequence
  SARM1 targeting guide sequence portion
gguguuggcgacuaacaagg

SEQ ID NO: 4196 - RNA, 20 nt, Artificial Sequence
  SARM1 targeting guide sequence portion
gguuagagucgagcaacggc

SEQ ID NO: 4197 - RNA, 20 nt, Artificial Sequence
  SARM1 targeting guide sequence portion
gguucaggaucacgcccagc

SEQ ID NO: 4198 - RNA, 20 nt, Artificial Sequence
  SARM1 targeting guide sequence portion
gguucgcguuccuucgccag

SEQ ID NO: 4199 - RNA, 20 nt, Artificial Sequence
  SARM1 targeting guide sequence portion
guagaaagccccgaugcacu

SEQ ID NO: 4200 - RNA, 20 nt, Artificial Sequence
  SARM1 targeting guide sequence portion
guagagaagcgcgcagccga

SEQ ID NO: 4201 - RNA, 20 nt, Artificial Sequence
  SARM1 targeting guide sequence portion
guagagcuggcgcggagcgu

SEQ ID NO: 4202 - RNA, 20 nt, Artificial Sequence
  SARM1 targeting guide sequence portion
guagcgguguuggcgacuaa

SEQ ID NO: 4203 - RNA, 20 nt, Artificial Sequence
  SARM1 targeting guide sequence portion
guauuggugccgccgcacgg

SEQ ID NO: 4204 - RNA, 20 nt, Artificial Sequence
  SARM1 targeting guide sequence portion
guccaccagacagcgggcga

SEQ ID NO: 4205 - RNA, 20 nt, Artificial Sequence
  SARM1 targeting guide sequence portion
guccagcgaggccacaagcg

SEQ ID NO: 4206 - RNA, 20 nt, Artificial Sequence
  SARM1 targeting guide sequence portion
guccaggccgccggccgcca

SEQ ID NO: 4207 - RNA, 20 nt, Artificial Sequence
  SARM1 targeting guide sequence portion
guccgugcggcggcaccaau

SEQ ID NO: 4208 - RNA, 20 nt, Artificial Sequence
  SARM1 targeting guide sequence portion
guccuccuuggagaaggcga

SEQ ID NO: 4209 - RNA, 20 nt, Artificial Sequence
  SARM1 targeting guide sequence portion
gucgagcaacggcacgaggc

SEQ ID NO: 4210 - RNA, 20 nt, Artificial Sequence
  SARM1 targeting guide sequence portion
gucgccaacaccgcuacugc

SEQ ID NO: 4211 - RNA, 20 nt, Artificial Sequence
  SARM1 targeting guide sequence portion
gucgcugcaccgccuggccc

SEQ ID NO: 4212 - RNA, 20 nt, Artificial Sequence
  SARM1 targeting guide sequence portion
gucgcuggcguccaccagac

SEQ ID NO: 4213 - RNA, 20 nt, Artificial Sequence
  SARM1 targeting guide sequence portion
gucgggcccgcggcccuggc

SEQ ID NO: 4214 - RNA, 20 nt, Artificial Sequence
  SARM1 targeting guide sequence portion
gucgucgggcccgcggcccu

SEQ ID NO: 4215 - RNA, 20 nt, Artificial Sequence
  SARM1 targeting guide sequence portion
gucuccuccgaaugcuugaa

SEQ ID NO: 4216 - RNA, 20 nt, Artificial Sequence
  SARM1 targeting guide sequence portion
gucugguggacgccagcgac

SEQ ID NO: 4217 - RNA, 20 nt, Artificial Sequence
  SARM1 targeting guide sequence portion
gucuugccuugcaggcucuu

SEQ ID NO: 4218 - RNA, 20 nt, Artificial Sequence
  SARM1 targeting guide sequence portion
gugauccugaaccuggcgaa

SEQ ID NO: 4219 - RNA, 20 nt, Artificial Sequence
  SARM1 targeting guide sequence portion
gugcagccgaagcagcucgu

SEQ ID NO: 4220 - RNA, 20 nt, Artificial Sequence
  SARM1 targeting guide sequence portion
gugcagcgacgcaugguaga

SEQ ID NO: 4221 - RNA, 20 nt, Artificial Sequence
  SARM1 targeting guide sequence portion
gugcagcgcgcaguugccca

SEQ ID NO: 4222 - RNA, 20 nt, Artificial Sequence
  SARM1 targeting guide sequence portion
gugcaucggggcuuucuacc

SEQ ID NO: 4223 - RNA, 20 nt, Artificial Sequence
  SARM1 targeting guide sequence portion
gugcccgagcgcuccaccuc

SEQ ID NO: 4224 - RNA, 20 nt, Artificial Sequence
  SARM1 targeting guide sequence portion
gugccgccgcacggaccccg

SEQ ID NO: 4225 - RNA, 20 nt, Artificial Sequence
  SARM1 targeting guide sequence portion
gugccguugcucgacucuaa

SEQ ID NO: 4226 - RNA, 20 nt, Artificial Sequence
  SARM1 targeting guide sequence portion
gugcggcggcaccaauacag

SEQ ID NO: 4227 - RNA, 20 nt, Artificial Sequence
  SARM1 targeting guide sequence portion
gugcuccaagaugccugcca

SEQ ID NO: 4228 - RNA, 20 nt, Artificial Sequence
  SARM1 targeting guide sequence portion
gugcuguauuggugccgccg

SEQ ID NO: 4229 - RNA, 20 nt, Artificial Sequence
  SARM1 targeting guide sequence portion
guggacgccagcgacacaag

SEQ ID NO: 4230 - RNA, 20 nt, Artificial Sequence
  SARM1 targeting guide sequence portion
guggagccgcuuguggccuc

SEQ ID NO: 4231 - RNA, 20 nt, Artificial Sequence
  SARM1 targeting guide sequence portion
guggagcgcgagguggagcg

SEQ ID NO: 4232 - RNA, 20 nt, Artificial Sequence
  SARM1 targeting guide sequence portion
guggagcgcucgggcacgcu

SEQ ID NO: 4233 - RNA, 20 nt, Artificial Sequence
  SARM1 targeting guide sequence portion
guggcaggcaucuuggagca

SEQ ID NO: 4234 - RNA, 20 nt, Artificial Sequence
  SARM1 targeting guide sequence portion
guggccucgcuggacccugg

SEQ ID NO: 4235 - RNA, 20 nt, Artificial Sequence
  SARM1 targeting guide sequence portion
guggcgcagcagcgcggggu

SEQ ID NO: 4236 - RNA, 20 nt, Artificial Sequence
  SARM1 targeting guide sequence portion
guggcgcgcauugggcuggg

SEQ ID NO: 4237 - RNA, 20 nt, Artificial Sequence
  SARM1 targeting guide sequence portion
guggcggccggcggccugga

SEQ ID NO: 4238 - RNA, 20 nt, Artificial Sequence
  SARM1 targeting guide sequence portion
guggcucuucccgcucgccu

SEQ ID NO: 4239 - RNA, 20 nt, Artificial Sequence
  SARM1 targeting guide sequence portion
gugucgcuggcguccaccag

SEQ ID NO: 4240 - RNA, 20 nt, Artificial Sequence
  SARM1 targeting guide sequence portion
guguuggcgacuaacaagga

SEQ ID NO: 4241 - RNA, 20 nt, Artificial Sequence
  SARM1 targeting guide sequence portion
guuagagucgagcaacggca

SEQ ID NO: 4242 - RNA, 20 nt, Artificial Sequence
  SARM1 targeting guide sequence portion
guuagucgccaacaccgcua

SEQ ID NO: 4243 - RNA, 20 nt, Artificial Sequence
  SARM1 targeting guide sequence portion
guucaagcauucggaggaga

SEQ ID NO: 4244 - RNA, 20 nt, Artificial Sequence
  SARM1 targeting guide sequence portion
guucaggaucacgcccagcc

SEQ ID NO: 4245 - RNA, 20 nt, Artificial Sequence
  SARM1 targeting guide sequence portion
guuccuucgccagguucagg

SEQ ID NO: 4246 - RNA, 20 nt, Artificial Sequence
  SARM1 targeting guide sequence portion
guucgcguuccuucgccagg

SEQ ID NO: 4247 - RNA, 20 nt, Artificial Sequence
  SARM1 targeting guide sequence portion
guugcccagcgccagcgcgc

SEQ ID NO: 4248 - RNA, 20 nt, Artificial Sequence
  SARM1 targeting guide sequence portion
guugcucgacucuaaccgcu

SEQ ID NO: 4249 - RNA, 20 nt, Artificial Sequence
  SARM1 targeting guide sequence portion
guuggcgacuaacaaggagg

SEQ ID NO: 4250 - RNA, 20 nt, Artificial Sequence
  SARM1 targeting guide sequence portion
uaacaaggagguggagcgcg

SEQ ID NO: 4251 - RNA, 20 nt, Artificial Sequence
  SARM1 targeting guide sequence portion
uaaccgcuuggaggcgcagu

SEQ ID NO: 4252 - RNA, 20 nt, Artificial Sequence
  SARM1 targeting guide sequence portion
uacagcaccgcguccaggcc

SEQ ID NO: 4253 - RNA, 20 nt, Artificial Sequence
  SARM1 targeting guide sequence portion
uaccaugcgucgcugcaccg

SEQ ID NO: 4254 - RNA, 20 nt, Artificial Sequence
  SARM1 targeting guide sequence portion
uaccucugcgccgaggcugc

SEQ ID NO: 4255 - RNA, 20 nt, Artificial Sequence
  SARM1 targeting guide sequence portion
uacggguucgcguuccuucg

SEQ ID NO: 4256 - RNA, 20 nt, Artificial Sequence
  SARM1 targeting guide sequence portion
uacugcgaggcaggcgugca

SEQ ID NO: 4257 - RNA, 20 nt, Artificial Sequence
  SARM1 targeting guide sequence portion
uagaaagccccgaugcacug

SEQ ID NO: 4258 - RNA, 20 nt, Artificial Sequence
  SARM1 targeting guide sequence portion
uagagaagcgcgcagccgag

SEQ ID NO: 4259 - RNA, 20 nt, Artificial Sequence
  SARM1 targeting guide sequence portion
uagagcuggcgcggagcgug

SEQ ID NO: 4260 - RNA, 20 nt, Artificial Sequence
  SARM1 targeting guide sequence portion
uagagucgagcaacggcacg

SEQ ID NO: 4261 - RNA, 20 nt, Artificial Sequence
  SARM1 targeting guide sequence portion
uagcgguguuggcgacuaac

SEQ ID NO: 4262 - RNA, 20 nt, Artificial Sequence
  SARM1 targeting guide sequence portion
uagucgccaacaccgcuacu

SEQ ID NO: 4263 - RNA, 20 nt, Artificial Sequence
  SARM1 targeting guide sequence portion
uauuggugccgccgcacgga

SEQ ID NO: 4264 - RNA, 20 nt, Artificial Sequence
  SARM1 targeting guide sequence portion
ucaagagccugcaaggcaag

SEQ ID NO: 4265 - RNA, 20 nt, Artificial Sequence
  SARM1 targeting guide sequence portion
ucaagcauucggaggagaca

SEQ ID NO: 4266 - RNA, 20 nt, Artificial Sequence
  SARM1 targeting guide sequence portion
ucacgcccagcccaaugcgc

SEQ ID NO: 4267 - RNA, 20 nt, Artificial Sequence
  SARM1 targeting guide sequence portion
ucaggaucacgcccagccca

SEQ ID NO: 4268 - RNA, 20 nt, Artificial Sequence
  SARM1 targeting guide sequence portion
uccaagaugccugccacgcu

SEQ ID NO: 4269 - RNA, 20 nt, Artificial Sequence
  SARM1 targeting guide sequence portion
uccaagcgguuagagucgag

SEQ ID NO: 4270 - RNA, 20 nt, Artificial Sequence
  SARM1 targeting guide sequence portion
uccaaggaggacgagcugcu

SEQ ID NO: 4271 - RNA, 20 nt, Artificial Sequence
  SARM1 targeting guide sequence portion
uccaccagacagcgggcgaa

SEQ ID NO: 4272 - RNA, 20 nt, Artificial Sequence
  SARM1 targeting guide sequence portion
uccaccuccuuguuagucgc

SEQ ID NO: 4273 - RNA, 20 nt, Artificial Sequence
  SARM1 targeting guide sequence portion
uccaccucgcgcuccaccuc

SEQ ID NO: 4274 - RNA, 20 nt, Artificial Sequence
  SARM1 targeting guide sequence portion
uccacgagcgccagcgugcc

SEQ ID NO: 4275 - RNA, 20 nt, Artificial Sequence
  SARM1 targeting guide sequence portion
uccagcgaggccacaagcgg

SEQ ID NO: 4276 - RNA, 20 nt, Artificial Sequence
  SARM1 targeting guide sequence portion
uccaggccgccggccgccac

SEQ ID NO: 4277 - RNA, 20 nt, Artificial Sequence
  SARM1 targeting guide sequence portion
ucccgcucgccuucuccaag

SEQ ID NO: 4278 - RNA, 20 nt, Artificial Sequence
  SARM1 targeting guide sequence portion
uccgaaugcuugaacaugug

SEQ ID NO: 4279 - RNA, 20 nt, Artificial Sequence
  SARM1 targeting guide sequence portion
uccgcgccagcucuacgggu

SEQ ID NO: 4280 - RNA, 20 nt, Artificial Sequence
  SARM1 targeting guide sequence portion
uccgugcggcggcaccaaua

SEQ ID NO: 4281 - RNA, 20 nt, Artificial Sequence
  SARM1 targeting guide sequence portion
uccuccgaaugcuugaacau

SEQ ID NO: 4282 - RNA, 20 nt, Artificial Sequence
  SARM1 targeting guide sequence portion
uccuccuuggagaaggcgag

SEQ ID NO: 4283 - RNA, 20 nt, Artificial Sequence
  SARM1 targeting guide sequence portion
uccugaaccuggcgaaggaa

SEQ ID NO: 4284 - RNA, 20 nt, Artificial Sequence
  SARM1 targeting guide sequence portion
uccuucgccagguucaggau

SEQ ID NO: 4285 - RNA, 20 nt, Artificial Sequence
  SARM1 targeting guide sequence portion
uccuuggagaaggcgagcgg

SEQ ID NO: 4286 - RNA, 20 nt, Artificial Sequence
  SARM1 targeting guide sequence portion
uccuuguuagucgccaacac

SEQ ID NO: 4287 - RNA, 20 nt, Artificial Sequence
  SARM1 targeting guide sequence portion
ucgacucuaaccgcuuggag

SEQ ID NO: 4288 - RNA, 20 nt, Artificial Sequence
  SARM1 targeting guide sequence portion
ucgagcaacggcacgaggcg

SEQ ID NO: 4289 - RNA, 20 nt, Artificial Sequence
  SARM1 targeting guide sequence portion
ucgcaguagcgguguuggcg

SEQ ID NO: 4290 - RNA, 20 nt, Artificial Sequence
  SARM1 targeting guide sequence portion
ucgccaacaccgcuacugcg

SEQ ID NO: 4291 - RNA, 20 nt, Artificial Sequence
  SARM1 targeting guide sequence portion
ucgccagguucaggaucacg

SEQ ID NO: 4292 - RNA, 20 nt, Artificial Sequence
  SARM1 targeting guide sequence portion
ucgcccgcugucugguggac

SEQ ID NO: 4293 - RNA, 20 nt, Artificial Sequence
  SARM1 targeting guide sequence portion
ucgccuucuccaaggaggac

SEQ ID NO: 4294 - RNA, 20 nt, Artificial Sequence
  SARM1 targeting guide sequence portion
ucgcgcuccaccuccuuguu

SEQ ID NO: 4295 - RNA, 20 nt, Artificial Sequence
  SARM1 targeting guide sequence portion
ucgcguuccuucgccagguu

SEQ ID NO: 4296 - RNA, 20 nt, Artificial Sequence
  SARM1 targeting guide sequence portion
ucgcugcaccgccuggcccc

SEQ ID NO: 4297 - RNA, 20 nt, Artificial Sequence
  SARM1 targeting guide sequence portion
ucgcuggacccuggccgcuu

SEQ ID NO: 4298 - RNA, 20 nt, Artificial Sequence
  SARM1 targeting guide sequence portion
ucgcuggcguccaccagaca

SEQ ID NO: 4299 - RNA, 20 nt, Artificial Sequence
  SARM1 targeting guide sequence portion
ucggaggagacaugccagag

SEQ ID NO: 4300 - RNA, 20 nt, Artificial Sequence
  SARM1 targeting guide sequence portion
ucggcgcagagguagaaagc

SEQ ID NO: 4301 - RNA, 20 nt, Artificial Sequence
  SARM1 targeting guide sequence portion
ucggcugcacgccugccucg

SEQ ID NO: 4302 - RNA, 20 nt, Artificial Sequence
  SARM1 targeting guide sequence portion
ucggcugcgcgcuucucuac

SEQ ID NO: 4303 - RNA, 20 nt, Artificial Sequence
  SARM1 targeting guide sequence portion
ucgggcacgcuggcgcucgu

SEQ ID NO: 4304 - RNA, 20 nt, Artificial Sequence
  SARM1 targeting guide sequence portion
ucgggcccgcggcccuggcu

SEQ ID NO: 4305 - RNA, 20 nt, Artificial Sequence
  SARM1 targeting guide sequence portion
ucggggcuuucuaccucugc

SEQ ID NO: 4306 - RNA, 20 nt, Artificial Sequence
  SARM1 targeting guide sequence portion
ucguccuccuuggagaaggc

SEQ ID NO: 4307 - RNA, 20 nt, Artificial Sequence
  SARM1 targeting guide sequence portion
ucgucgggcccgcggcccug

SEQ ID NO: 4308 - RNA, 20 nt, Artificial Sequence
  SARM1 targeting guide sequence portion
ucgugccguugcucgacucu

SEQ ID NO: 4309 - RNA, 20 nt, Artificial Sequence
  SARM1 targeting guide sequence portion
ucguggagccgcuuguggcc

SEQ ID NO: 4310 - RNA, 20 nt, Artificial Sequence
  SARM1 targeting guide sequence portion
ucuaaccgcuuggaggcgca

SEQ ID NO: 4311 - RNA, 20 nt, Artificial Sequence
  SARM1 targeting guide sequence portion
ucuaccaugcgucgcugcac

SEQ ID NO: 4312 - RNA, 20 nt, Artificial Sequence
  SARM1 targeting guide sequence portion
ucuaccucugcgccgaggcu

SEQ ID NO: 4313 - RNA, 20 nt, Artificial Sequence
  SARM1 targeting guide sequence portion
ucuacggguucgcguuccuu

SEQ ID NO: 4314 - RNA, 20 nt, Artificial Sequence
  SARM1 targeting guide sequence portion
ucuccaaggaggacgagcug

SEQ ID NO: 4315 - RNA, 20 nt, Artificial Sequence
  SARM1 targeting guide sequence portion
ucuccuccgaaugcuugaac

SEQ ID NO: 4316 - RNA, 20 nt, Artificial Sequence
  SARM1 targeting guide sequence portion
ucucuaccaugcgucgcugc

SEQ ID NO: 4317 - RNA, 20 nt, Artificial Sequence
  SARM1 targeting guide sequence portion
ucugcgccgaggcugccauc

SEQ ID NO: 4318 - RNA, 20 nt, Artificial Sequence
  SARM1 targeting guide sequence portion
ucuggcaugucuccuccgaa

SEQ ID NO: 4319 - RNA, 20 nt, Artificial Sequence
  SARM1 targeting guide sequence portion
ucugguggacgccagcgaca

SEQ ID NO: 4320 - RNA, 20 nt, Artificial Sequence
  SARM1 targeting guide sequence portion
ucuucccgcucgccuucucc

SEQ ID NO: 4321 - RNA, 20 nt, Artificial Sequence
  SARM1 targeting guide sequence portion
ucuugauggcagccucggcg

SEQ ID NO: 4322 - RNA, 20 nt, Artificial Sequence
  SARM1 targeting guide sequence portion
ucuugccuugcaggcucuug

SEQ ID NO: 4323 - RNA, 20 nt, Artificial Sequence
  SARM1 targeting guide sequence portion
ucuuggagcacauguucaag

SEQ ID NO: 4324 - RNA, 20 nt, Artificial Sequence
  SARM1 targeting guide sequence portion
ugaacaugugcuccaagaug

SEQ ID NO: 4325 - RNA, 20 nt, Artificial Sequence
  SARM1 targeting guide sequence portion
ugaaccuggcgaaggaacgc

SEQ ID NO: 4326 - RNA, 20 nt, Artificial Sequence
  SARM1 targeting guide sequence portion
ugauccugaaccuggcgaag

SEQ ID NO: 4327 - RNA, 20 nt, Artificial Sequence
  SARM1 targeting guide sequence portion
ugauggcagccucggcgcag

SEQ ID NO: 4328 - RNA, 20 nt, Artificial Sequence
  SARM1 targeting guide sequence portion
ugcaccgccuggcccccgug

SEQ ID NO: 4329 - RNA, 20 nt, Artificial Sequence
  SARM1 targeting guide sequence portion
ugcacgccugccucgcagua

SEQ ID NO: 4330 - RNA, 20 nt, Artificial Sequence
  SARM1 targeting guide sequence portion
ugcacgggggccaggcggug

SEQ ID NO: 4331 - RNA, 20 nt, Artificial Sequence
  SARM1 targeting guide sequence portion
ugcacugcgccuccaagcgg

SEQ ID NO: 4332 - RNA, 20 nt, Artificial Sequence
  SARM1 targeting guide sequence portion
ugcagccgaagcagcucguc

SEQ ID NO: 4333 - RNA, 20 nt, Artificial Sequence
  SARM1 targeting guide sequence portion
ugcagcgacgcaugguagag

SEQ ID NO: 4334 - RNA, 20 nt, Artificial Sequence
  SARM1 targeting guide sequence portion
ugcagcgccucgugccguug

SEQ ID NO: 4335 - RNA, 20 nt, Artificial Sequence
  SARM1 targeting guide sequence portion
ugcagcgcgcaguugcccag

SEQ ID NO: 4336 - RNA, 20 nt, Artificial Sequence
  SARM1 targeting guide sequence portion
ugcaggcucuugauggcagc

SEQ ID NO: 4337 - RNA, 20 nt, Artificial Sequence
  SARM1 targeting guide sequence portion
ugcaggucgucgggcccgcg

SEQ ID NO: 4338 - RNA, 20 nt, Artificial Sequence
  SARM1 targeting guide sequence portion
ugcaucggggcuuucuaccu

SEQ ID NO: 4339 - RNA, 20 nt, Artificial Sequence
  SARM1 targeting guide sequence portion
ugccacgcuccgcgccagcu

SEQ ID NO: 4340 - RNA, 20 nt, Artificial Sequence
  SARM1 targeting guide sequence portion
ugccagaggcugguggcggc

SEQ ID NO: 4341 - RNA, 20 nt, Artificial Sequence
  SARM1 targeting guide sequence portion
ugccaucaagagccugcaag

SEQ ID NO: 4342 - RNA, 20 nt, Artificial Sequence
  SARM1 targeting guide sequence portion
ugcccagcgccagcgcgcag

SEQ ID NO: 4343 - RNA, 20 nt, Artificial Sequence
  SARM1 targeting guide sequence portion
ugcccgagcgcuccaccucg

SEQ ID NO: 4344 - RNA, 20 nt, Artificial Sequence
  SARM1 targeting guide sequence portion
ugccgccgcacggaccccgc

SEQ ID NO: 4345 - RNA, 20 nt, Artificial Sequence
  SARM1 targeting guide sequence portion
ugccguugcucgacucuaac

SEQ ID NO: 4346 - RNA, 20 nt, Artificial Sequence
  SARM1 targeting guide sequence portion
ugccucgcaguagcgguguu

SEQ ID NO: 4347 - RNA, 20 nt, Artificial Sequence
  SARM1 targeting guide sequence portion
ugccugccacgcuccgcgcc

SEQ ID NO: 4348 - RNA, 20 nt, Artificial Sequence
  SARM1 targeting guide sequence portion
ugccuugcaggcucuugaug

SEQ ID NO: 4349 - RNA, 20 nt, Artificial Sequence
  SARM1 targeting guide sequence portion
ugcgaggcaggcgugcagcc

SEQ ID NO: 4350 - RNA, 20 nt, Artificial Sequence
  SARM1 targeting guide sequence portion
ugcgccacugcgcgcuggcg

SEQ ID NO: 4351 - RNA, 20 nt, Artificial Sequence
  SARM1 targeting guide sequence portion
ugcgccgaggcugccaucaa

SEQ ID NO: 4352 - RNA, 20 nt, Artificial Sequence
  SARM1 targeting guide sequence portion
ugcgccuccaagcgguuaga

SEQ ID NO: 4353 - RNA, 20 nt, Artificial Sequence
  SARM1 targeting guide sequence portion
ugcgcgcugcacgggggcca

SEQ ID NO: 4354 - RNA, 20 nt, Artificial Sequence
  SARM1 targeting guide sequence portion
ugcgcgcuggcgcugggcaa

SEQ ID NO: 4355 - RNA, 20 nt, Artificial Sequence
  SARM1 targeting guide sequence portion
ugcgcgcuucucuaccaugc

SEQ ID NO: 4356 - RNA, 20 nt, Artificial Sequence
  SARM1 targeting guide sequence portion
ugcggcggcaccaauacagc

SEQ ID NO: 4357 - RNA, 20 nt, Artificial Sequence
  SARM1 targeting guide sequence portion
ugcgucgcugcaccgccugg

SEQ ID NO: 4358 - RNA, 20 nt, Artificial Sequence
  SARM1 targeting guide sequence portion
ugcuccaagaugccugccac

SEQ ID NO: 4359 - RNA, 20 nt, Artificial Sequence
  SARM1 targeting guide sequence portion
ugcucgacucuaaccgcuug

SEQ ID NO: 4360 - RNA, 20 nt, Artificial Sequence
  SARM1 targeting guide sequence portion
ugcugcgccacugcgcgcug

SEQ ID NO: 4361 - RNA, 20 nt, Artificial Sequence
  SARM1 targeting guide sequence portion
ugcuguauuggugccgccgc

SEQ ID NO: 4362 - RNA, 20 nt, Artificial Sequence
  SARM1 targeting guide sequence portion
ugcuucggcugcacgccugc

SEQ ID NO: 4363 - RNA, 20 nt, Artificial Sequence
  SARM1 targeting guide sequence portion
ugcuugaacaugugcuccaa

SEQ ID NO: 4364 - RNA, 20 nt, Artificial Sequence
  SARM1 targeting guide sequence portion
uggacccuggccgcuucgcc

SEQ ID NO: 4365 - RNA, 20 nt, Artificial Sequence
  SARM1 targeting guide sequence portion
uggacgccagcgacacaagc

SEQ ID NO: 4366 - RNA, 20 nt, Artificial Sequence
  SARM1 targeting guide sequence portion
uggacgcggugcuguauugg

SEQ ID NO: 4367 - RNA, 20 nt, Artificial Sequence
  SARM1 targeting guide sequence portion
uggagaaggcgagcgggaag

SEQ ID NO: 4368 - RNA, 20 nt, Artificial Sequence
  SARM1 targeting guide sequence portion
uggagcacauguucaagcau

SEQ ID NO: 4369 - RNA, 20 nt, Artificial Sequence
  SARM1 targeting guide sequence portion
uggagccgcuuguggccucg

SEQ ID NO: 4370 - RNA, 20 nt, Artificial Sequence
  SARM1 targeting guide sequence portion
uggagcgcgagguggagcgc

SEQ ID NO: 4371 - RNA, 20 nt, Artificial Sequence
  SARM1 targeting guide sequence portion
uggagcgcucgggcacgcug

SEQ ID NO: 4372 - RNA, 20 nt, Artificial Sequence
  SARM1 targeting guide sequence portion
uggaggcgcagugcaucggg

SEQ ID NO: 4373 - RNA, 20 nt, Artificial Sequence
  SARM1 targeting guide sequence portion
uggcagccucggcgcagagg

SEQ ID NO: 4374 - RNA, 20 nt, Artificial Sequence
  SARM1 targeting guide sequence portion
uggcaggcaucuuggagcac

SEQ ID NO: 4375 - RNA, 20 nt, Artificial Sequence
  SARM1 targeting guide sequence portion
uggcaugucuccuccgaaug

SEQ ID NO: 4376 - RNA, 20 nt, Artificial Sequence
  SARM1 targeting guide sequence portion
uggcccccgugcagcgcgca

SEQ ID NO: 4377 - RNA, 20 nt, Artificial Sequence
  SARM1 targeting guide sequence portion
uggccgcuucgcccgcuguc

SEQ ID NO: 4378 - RNA, 20 nt, Artificial Sequence
  SARM1 targeting guide sequence portion
uggccucgcuggacccuggc

SEQ ID NO: 4379 - RNA, 20 nt, Artificial Sequence
  SARM1 targeting guide sequence portion
uggcgaaggaacgcgaaccc

SEQ ID NO: 4380 - RNA, 20 nt, Artificial Sequence
  SARM1 targeting guide sequence portion
uggcgacuaacaaggaggug

SEQ ID NO: 4381 - RNA, 20 nt, Artificial Sequence
  SARM1 targeting guide sequence portion
uggcgcagcagcgcgggguc

SEQ ID NO: 4382 - RNA, 20 nt, Artificial Sequence
  SARM1 targeting guide sequence portion
uggcgcgcauugggcugggc

SEQ ID NO: 4383 - RNA, 20 nt, Artificial Sequence
  SARM1 targeting guide sequence portion
uggcgcggagcguggcaggc

SEQ ID NO: 4384 - RNA, 20 nt, Artificial Sequence
  SARM1 targeting guide sequence portion
uggcgcucguggagccgcuu

SEQ ID NO: 4385 - RNA, 20 nt, Artificial Sequence
  SARM1 targeting guide sequence portion
uggcgcugggcaacugcgcg

SEQ ID NO: 4386 - RNA, 20 nt, Artificial Sequence
  SARM1 targeting guide sequence portion
uggcggccggcggccuggac

SEQ ID NO: 4387 - RNA, 20 nt, Artificial Sequence
  SARM1 targeting guide sequence portion
uggcguccaccagacagcgg

SEQ ID NO: 4388 - RNA, 20 nt, Artificial Sequence
  SARM1 targeting guide sequence portion
uggcucuucccgcucgccuu

SEQ ID NO: 4389 - RNA, 20 nt, Artificial Sequence
  SARM1 targeting guide sequence portion
uggcuugugucgcuggcguc

SEQ ID NO: 4390 - RNA, 20 nt, Artificial Sequence
  SARM1 targeting guide sequence portion
ugggcaacugcgcgcugcac

SEQ ID NO: 4391 - RNA, 20 nt, Artificial Sequence
  SARM1 targeting guide sequence portion
ugggcagagaccgcguggcg

SEQ ID NO: 4392 - RNA, 20 nt, Artificial Sequence
  SARM1 targeting guide sequence portion
ugggcgugauccugaaccug

SEQ ID NO: 4393 - RNA, 20 nt, Artificial Sequence
  SARM1 targeting guide sequence portion
ugggcugggcgugauccuga

SEQ ID NO: 4394 - RNA, 20 nt, Artificial Sequence
  SARM1 targeting guide sequence portion
ugguagagaagcgcgcagcc

SEQ ID NO: 4395 - RNA, 20 nt, Artificial Sequence
  SARM1 targeting guide sequence portion
uggucuugccuugcaggcuc

SEQ ID NO: 4396 - RNA, 20 nt, Artificial Sequence
  SARM1 targeting guide sequence portion
uggugccgccgcacggaccc

SEQ ID NO: 4397 - RNA, 20 nt, Artificial Sequence
  SARM1 targeting guide sequence portion
ugguggacgccagcgacaca

SEQ ID NO: 4398 - RNA, 20 nt, Artificial Sequence
  SARM1 targeting guide sequence portion
ugguggcggccggcggccug

SEQ ID NO: 4399 - RNA, 20 nt, Artificial Sequence
  SARM1 targeting guide sequence portion
uguauuggugccgccgcacg

SEQ ID NO: 4400 - RNA, 20 nt, Artificial Sequence
  SARM1 targeting guide sequence portion
ugucgcuggcguccaccaga

SEQ ID NO: 4401 - RNA, 20 nt, Artificial Sequence
  SARM1 targeting guide sequence portion
ugucuccuccgaaugcuuga

SEQ ID NO: 4402 - RNA, 20 nt, Artificial Sequence
  SARM1 targeting guide sequence portion
ugucugguggacgccagcga

SEQ ID NO: 4403 - RNA, 20 nt, Artificial Sequence
  SARM1 targeting guide sequence portion
ugugcuccaagaugccugcc

SEQ ID NO: 4404 - RNA, 20 nt, Artificial Sequence
  SARM1 targeting guide sequence portion
uguggccucgcuggacccug

SEQ ID NO: 4405 - RNA, 20 nt, Artificial Sequence
  SARM1 targeting guide sequence portion
ugugucgcuggcguccacca

SEQ ID NO: 4406 - RNA, 20 nt, Artificial Sequence
  SARM1 targeting guide sequence portion
uguuagucgccaacaccgcu

SEQ ID NO: 4407 - RNA, 20 nt, Artificial Sequence
  SARM1 targeting guide sequence portion
uguucaagcauucggaggag

SEQ ID NO: 4408 - RNA, 20 nt, Artificial Sequence
  SARM1 targeting guide sequence portion
uguuggcgacuaacaaggag

SEQ ID NO: 4409 - RNA, 20 nt, Artificial Sequence
  SARM1 targeting guide sequence portion
uuagagucgagcaacggcac

SEQ ID NO: 4410 - RNA, 20 nt, Artificial Sequence
  SARM1 targeting guide sequence portion
uuagucgccaacaccgcuac

SEQ ID NO: 4411 - RNA, 20 nt, Artificial Sequence
  SARM1 targeting guide sequence portion
uucaagcauucggaggagac

SEQ ID NO: 4412 - RNA, 20 nt, Artificial Sequence
  SARM1 targeting guide sequence portion
uucaggaucacgcccagccc

SEQ ID NO: 4413 - RNA, 20 nt, Artificial Sequence
  SARM1 targeting guide sequence portion
uucccgcucgccuucuccaa

SEQ ID NO: 4414 - RNA, 20 nt, Artificial Sequence
  SARM1 targeting guide sequence portion
uuccuucgccagguucagga

SEQ ID NO: 4415 - RNA, 20 nt, Artificial Sequence
  SARM1 targeting guide sequence portion
uucgccagguucaggaucac

SEQ ID NO: 4416 - RNA, 20 nt, Artificial Sequence
  SARM1 targeting guide sequence portion
uucgcccgcugucuggugga

SEQ ID NO: 4417 - RNA, 20 nt, Artificial Sequence
  SARM1 targeting guide sequence portion
uucgcguuccuucgccaggu

SEQ ID NO: 4418 - RNA, 20 nt, Artificial Sequence
  SARM1 targeting guide sequence portion
uucggaggagacaugccaga

SEQ ID NO: 4419 - RNA, 20 nt, Artificial Sequence
  SARM1 targeting guide sequence portion
uucggcugcacgccugccuc

SEQ ID NO: 4420 - RNA, 20 nt, Artificial Sequence
  SARM1 targeting guide sequence portion
uucuaccucugcgccgaggc

SEQ ID NO: 4421 - RNA, 20 nt, Artificial Sequence
  SARM1 targeting guide sequence portion
uucuccaaggaggacgagcu

SEQ ID NO: 4422 - RNA, 20 nt, Artificial Sequence
  SARM1 targeting guide sequence portion
uucucuaccaugcgucgcug

SEQ ID NO: 4423 - RNA, 20 nt, Artificial Sequence
  SARM1 targeting guide sequence portion
uugaacaugugcuccaagau

SEQ ID NO: 4424 - RNA, 20 nt, Artificial Sequence
  SARM1 targeting guide sequence portion
uugauggcagccucggcgca

SEQ ID NO: 4425 - RNA, 20 nt, Artificial Sequence
  SARM1 targeting guide sequence portion
uugcaggcucuugauggcag

SEQ ID NO: 4426 - RNA, 20 nt, Artificial Sequence
  SARM1 targeting guide sequence portion
uugcccagcgccagcgcgca

SEQ ID NO: 4427 - RNA, 20 nt, Artificial Sequence
  SARM1 targeting guide sequence portion
uugccuugcaggcucuugau

SEQ ID NO: 4428 - RNA, 20 nt, Artificial Sequence
  SARM1 targeting guide sequence portion
uugcucgacucuaaccgcuu

SEQ ID NO: 4429 - RNA, 20 nt, Artificial Sequence
  SARM1 targeting guide sequence portion
uuggagaaggcgagcgggaa

SEQ ID NO: 4430 - RNA, 20 nt, Artificial Sequence
  SARM1 targeting guide sequence portion
uuggagcacauguucaagca

SEQ ID NO: 4431 - RNA, 20 nt, Artificial Sequence
  SARM1 targeting guide sequence portion
uuggaggcgcagugcaucgg

SEQ ID NO: 4432 - RNA, 20 nt, Artificial Sequence
  SARM1 targeting guide sequence portion
uuggcgacuaacaaggaggu

SEQ ID NO: 4433 - RNA, 20 nt, Artificial Sequence
  SARM1 targeting guide sequence portion
uugggcugggcgugauccug

SEQ ID NO: 4434 - RNA, 20 nt, Artificial Sequence
  SARM1 targeting guide sequence portion
uuggucuugccuugcaggcu

SEQ ID NO: 4435 - RNA, 20 nt, Artificial Sequence
  SARM1 targeting guide sequence portion
uuggugccgccgcacggacc

SEQ ID NO: 4436 - RNA, 20 nt, Artificial Sequence
  SARM1 targeting guide sequence portion
uuguggccucgcuggacccu

SEQ ID NO: 4437 - RNA, 20 nt, Artificial Sequence
  SARM1 targeting guide sequence portion
uugugucgcuggcguccacc

SEQ ID NO: 4438 - RNA, 20 nt, Artificial Sequence
  SARM1 targeting guide sequence portion
uuguuagucgccaacaccgc

SEQ ID NO: 4439 - RNA, 20 nt, Artificial Sequence
  SARM1 targeting guide sequence portion
uuucuaccucugcgccgagg

SEQ ID NO: 4440 - RNA, 21 nt, Artificial Sequence
  SARM1 targeting guide sequence portion
aaagccccgaugcacugcgcc

SEQ ID NO: 4441 - RNA, 21 nt, Artificial Sequence
  SARM1 targeting guide sequence portion
aacaaggagguggagcgcgag

SEQ ID NO: 4442 - RNA, 21 nt, Artificial Sequence
  SARM1 targeting guide sequence portion
aacaccgcuacugcgaggcag

SEQ ID NO: 4443 - RNA, 21 nt, Artificial Sequence
  SARM1 targeting guide sequence portion
aacaugugcuccaagaugccu

SEQ ID NO: 4444 - RNA, 21 nt, Artificial Sequence
  SARM1 targeting guide sequence portion
aacccguagagcuggcgcgga

SEQ ID NO: 4445 - RNA, 21 nt, Artificial Sequence
  SARM1 targeting guide sequence portion
aaccgcuuggaggcgcagugc

SEQ ID NO: 4446 - RNA, 21 nt, Artificial Sequence
  SARM1 targeting guide sequence portion
aaccuggcgaaggaacgcgaa

SEQ ID NO: 4447 - RNA, 21 nt, Artificial Sequence
  SARM1 targeting guide sequence portion
aacgcgaacccguagagcugg

SEQ ID NO: 4448 - RNA, 21 nt, Artificial Sequence
  SARM1 targeting guide sequence portion
aacggcacgaggcgcugcagg

SEQ ID NO: 4449 - RNA, 21 nt, Artificial Sequence
  SARM1 targeting guide sequence portion
aacugcgcgcugcacgggggc

SEQ ID NO: 4450 - RNA, 21 nt, Artificial Sequence
  SARM1 targeting guide sequence portion
aagagccacucggcugcgcgc

SEQ ID NO: 4451 - RNA, 21 nt, Artificial Sequence
  SARM1 targeting guide sequence portion
aagagccugcaaggcaagacc

SEQ ID NO: 4452 - RNA, 21 nt, Artificial Sequence
  SARM1 targeting guide sequence portion
aagaugccugccacgcuccgc

SEQ ID NO: 4453 - RNA, 21 nt, Artificial Sequence
  SARM1 targeting guide sequence portion
aagcagcucguccuccuugga

SEQ ID NO: 4454 - RNA, 21 nt, Artificial Sequence
  SARM1 targeting guide sequence portion
aagcauucggaggagacaugc

SEQ ID NO: 4455 - RNA, 21 nt, Artificial Sequence
  SARM1 targeting guide sequence portion
aagccagggccgcgggcccga

SEQ ID NO: 4456 - RNA, 21 nt, Artificial Sequence
  SARM1 targeting guide sequence portion
aagccccgaugcacugcgccu

SEQ ID NO: 4457 - RNA, 21 nt, Artificial Sequence
  SARM1 targeting guide sequence portion
aagcgcgcagccgaguggcuc

SEQ ID NO: 4458 - RNA, 21 nt, Artificial Sequence
  SARM1 targeting guide sequence portion
aagcggccaggguccagcgag

SEQ ID NO: 4459 - RNA, 21 nt, Artificial Sequence
  SARM1 targeting guide sequence portion
aagcggcuccacgagcgccag

SEQ ID NO: 4460 - RNA, 21 nt, Artificial Sequence
  SARM1 targeting guide sequence portion
aagcgguuagagucgagcaac

SEQ ID NO: 4461 - RNA, 21 nt, Artificial Sequence
  SARM1 targeting guide sequence portion
aaggaacgcgaacccguagag

SEQ ID NO: 4462 - RNA, 21 nt, Artificial Sequence
  SARM1 targeting guide sequence portion
aaggaggacgagcugcuucgg

SEQ ID NO: 4463 - RNA, 21 nt, Artificial Sequence
  SARM1 targeting guide sequence portion
aaggagguggagcgcgaggug

SEQ ID NO: 4464 - RNA, 21 nt, Artificial Sequence
  SARM1 targeting guide sequence portion
aaggcgagcgggaagagccac

SEQ ID NO: 4465 - RNA, 21 nt, Artificial Sequence
  SARM1 targeting guide sequence portion
aauacagcaccgcguccaggc

SEQ ID NO: 4466 - RNA, 21 nt, Artificial Sequence
  SARM1 targeting guide sequence portion
aaugcuugaacaugugcucca

SEQ ID NO: 4467 - RNA, 21 nt, Artificial Sequence
  SARM1 targeting guide sequence portion
acaagccagggccgcgggccc

SEQ ID NO: 4468 - RNA, 21 nt, Artificial Sequence
  SARM1 targeting guide sequence portion
acaagcggcuccacgagcgcc

SEQ ID NO: 4469 - RNA, 21 nt, Artificial Sequence
  SARM1 targeting guide sequence portion
acaaggagguggagcgcgagg

SEQ ID NO: 4470 - RNA, 21 nt, Artificial Sequence
  SARM1 targeting guide sequence portion
acacaagccagggccgcgggc

SEQ ID NO: 4471 - RNA, 21 nt, Artificial Sequence
  SARM1 targeting guide sequence portion
acaccgcuacugcgaggcagg

SEQ ID NO: 4472 - RNA, 21 nt, Artificial Sequence
  SARM1 targeting guide sequence portion
acagcaccgcguccaggccgc

SEQ ID NO: 4473 - RNA, 21 nt, Artificial Sequence
  SARM1 targeting guide sequence portion
acagcgggcgaagcggccagg

SEQ ID NO: 4474 - RNA, 21 nt, Artificial Sequence
  SARM1 targeting guide sequence portion
acaugccagaggcugguggcg

SEQ ID NO: 4475 - RNA, 21 nt, Artificial Sequence
  SARM1 targeting guide sequence portion
acaugugcuccaagaugccug

SEQ ID NO: 4476 - RNA, 21 nt, Artificial Sequence
  SARM1 targeting guide sequence portion
acauguucaagcauucggagg

SEQ ID NO: 4477 - RNA, 21 nt, Artificial Sequence
  SARM1 targeting guide sequence portion
accaauacagcaccgcgucca

SEQ ID NO: 4478 - RNA, 21 nt, Artificial Sequence
  SARM1 targeting guide sequence portion
accagacagcgggcgaagcgg

SEQ ID NO: 4479 - RNA, 21 nt, Artificial Sequence
  SARM1 targeting guide sequence portion
accagccucuggcaugucucc

SEQ ID NO: 4480 - RNA, 21 nt, Artificial Sequence
  SARM1 targeting guide sequence portion
accaugcgucgcugcaccgcc

SEQ ID NO: 4481 - RNA, 21 nt, Artificial Sequence
  SARM1 targeting guide sequence portion
acccaccuuggucuugccuug

SEQ ID NO: 4482 - RNA, 21 nt, Artificial Sequence
  SARM1 targeting guide sequence portion
accccgcgcugcugcgccacu

SEQ ID NO: 4483 - RNA, 21 nt, Artificial Sequence
  SARM1 targeting guide sequence portion
acccguagagcuggcgcggag

SEQ ID NO: 4484 - RNA, 21 nt, Artificial Sequence
  SARM1 targeting guide sequence portion
acccuggccgcuucgcccgcu

SEQ ID NO: 4485 - RNA, 21 nt, Artificial Sequence
  SARM1 targeting guide sequence portion
accgccuggcccccgugcagc

SEQ ID NO: 4486 - RNA, 21 nt, Artificial Sequence
  SARM1 targeting guide sequence portion
accgcguggcgcgcauugggc

SEQ ID NO: 4487 - RNA, 21 nt, Artificial Sequence
  SARM1 targeting guide sequence portion
accgcuacugcgaggcaggcg

SEQ ID NO: 4488 - RNA, 21 nt, Artificial Sequence
  SARM1 targeting guide sequence portion
accgcuuggaggcgcagugca

SEQ ID NO: 4489 - RNA, 21 nt, Artificial Sequence
  SARM1 targeting guide sequence portion
accuccuuguuagucgccaac

SEQ ID NO: 4490 - RNA, 21 nt, Artificial Sequence
  SARM1 targeting guide sequence portion
accucgcgcuccaccuccuug

SEQ ID NO: 4491 - RNA, 21 nt, Artificial Sequence
  SARM1 targeting guide sequence portion
accucugcgccgaggcugcca

SEQ ID NO: 4492 - RNA, 21 nt, Artificial Sequence
  SARM1 targeting guide sequence portion
accugcagcgccucgugccgu

SEQ ID NO: 4493 - RNA, 21 nt, Artificial Sequence
  SARM1 targeting guide sequence portion
accuggcgaaggaacgcgaac

SEQ ID NO: 4494 - RNA, 21 nt, Artificial Sequence
  SARM1 targeting guide sequence portion
accuuggucuugccuugcagg

SEQ ID NO: 4495 - RNA, 21 nt, Artificial Sequence
  SARM1 targeting guide sequence portion
acgaccugcagcgccucgugc

SEQ ID NO: 4496 - RNA, 21 nt, Artificial Sequence
  SARM1 targeting guide sequence portion
acgagcgccagcgugcccgag

SEQ ID NO: 4497 - RNA, 21 nt, Artificial Sequence
  SARM1 targeting guide sequence portion
acgagcugcuucggcugcacg

SEQ ID NO: 4498 - RNA, 21 nt, Artificial Sequence
  SARM1 targeting guide sequence portion
acgaggcgcugcaggucgucg

SEQ ID NO: 4499 - RNA, 21 nt, Artificial Sequence
  SARM1 targeting guide sequence portion
acgcaugguagagaagcgcgc

SEQ ID NO: 4500 - RNA, 21 nt, Artificial Sequence
  SARM1 targeting guide sequence portion
acgccagcgacacaagccagg

SEQ ID NO: 4501 - RNA, 21 nt, Artificial Sequence
  SARM1 targeting guide sequence portion
acgcccagcccaaugcgcgcc

SEQ ID NO: 4502 - RNA, 21 nt, Artificial Sequence
  SARM1 targeting guide sequence portion
acgccugccucgcaguagcgg

SEQ ID NO: 4503 - RNA, 21 nt, Artificial Sequence
  SARM1 targeting guide sequence portion
acgcgaacccguagagcuggc

SEQ ID NO: 4504 - RNA, 21 nt, Artificial Sequence
  SARM1 targeting guide sequence portion
acgcggugcuguauuggugcc

SEQ ID NO: 4505 - RNA, 21 nt, Artificial Sequence
  SARM1 targeting guide sequence portion
acgcuccgcgccagcucuacg

SEQ ID NO: 4506 - RNA, 21 nt, Artificial Sequence
  SARM1 targeting guide sequence portion
acgcuggcgcucguggagccg

SEQ ID NO: 4507 - RNA, 21 nt, Artificial Sequence
  SARM1 targeting guide sequence portion
acggaccccgcgcugcugcgc

SEQ ID NO: 4508 - RNA, 21 nt, Artificial Sequence
  SARM1 targeting guide sequence portion
acggcacgaggcgcugcaggu

SEQ ID NO: 4509 - RNA, 21 nt, Artificial Sequence
  SARM1 targeting guide sequence portion
acgggggccaggcggugcagc

SEQ ID NO: 4510 - RNA, 21 nt, Artificial Sequence
  SARM1 targeting guide sequence portion
acggguucgcguuccuucgcc

SEQ ID NO: 4511 - RNA, 21 nt, Artificial Sequence
  SARM1 targeting guide sequence portion
acuaacaaggagguggagcgc

SEQ ID NO: 4512 - RNA, 21 nt, Artificial Sequence
  SARM1 targeting guide sequence portion
acucggcugcgcgcuucucua

SEQ ID NO: 4513 - RNA, 21 nt, Artificial Sequence
  SARM1 targeting guide sequence portion
acucuaaccgcuuggaggcgc

SEQ ID NO: 4514 - RNA, 21 nt, Artificial Sequence
  SARM1 targeting guide sequence portion
acugcgaggcaggcgugcagc

SEQ ID NO: 4515 - RNA, 21 nt, Artificial Sequence
  SARM1 targeting guide sequence portion
acugcgccuccaagcgguuag

SEQ ID NO: 4516 - RNA, 21 nt, Artificial Sequence
  SARM1 targeting guide sequence portion
acugcgcgcugcacgggggcc

SEQ ID NO: 4517 - RNA, 21 nt, Artificial Sequence
  SARM1 targeting guide sequence portion
acugcgcgcuggcgcugggca

SEQ ID NO: 4518 - RNA, 21 nt, Artificial Sequence
  SARM1 targeting guide sequence portion
agaaagccccgaugcacugcg

SEQ ID NO: 4519 - RNA, 21 nt, Artificial Sequence
  SARM1 targeting guide sequence portion
agaagcgcgcagccgaguggc

SEQ ID NO: 4520 - RNA, 21 nt, Artificial Sequence
  SARM1 targeting guide sequence portion
agaaggcgagcgggaagagcc

SEQ ID NO: 4521 - RNA, 21 nt, Artificial Sequence
  SARM1 targeting guide sequence portion
agacagcgggcgaagcggcca

SEQ ID NO: 4522 - RNA, 21 nt, Artificial Sequence
  SARM1 targeting guide sequence portion
agacaugccagaggcuggugg

SEQ ID NO: 4523 - RNA, 21 nt, Artificial Sequence
  SARM1 targeting guide sequence portion
agaccgcguggcgcgcauugg

SEQ ID NO: 4524 - RNA, 21 nt, Artificial Sequence
  SARM1 targeting guide sequence portion
agagaagcgcgcagccgagug

SEQ ID NO: 4525 - RNA, 21 nt, Artificial Sequence
  SARM1 targeting guide sequence portion
agagaccgcguggcgcgcauu

SEQ ID NO: 4526 - RNA, 21 nt, Artificial Sequence
  SARM1 targeting guide sequence portion
agagccacucggcugcgcgcu

SEQ ID NO: 4527 - RNA, 21 nt, Artificial Sequence
  SARM1 targeting guide sequence portion
agagccugcaaggcaagacca

SEQ ID NO: 4528 - RNA, 21 nt, Artificial Sequence
  SARM1 targeting guide sequence portion
agagcuggcgcggagcguggc

SEQ ID NO: 4529 - RNA, 21 nt, Artificial Sequence
  SARM1 targeting guide sequence portion
agaggcugguggcggccggcg

SEQ ID NO: 4530 - RNA, 21 nt, Artificial Sequence
  SARM1 targeting guide sequence portion
agagguagaaagccccgaugc

SEQ ID NO: 4531 - RNA, 21 nt, Artificial Sequence
  SARM1 targeting guide sequence portion
agagucgagcaacggcacgag

SEQ ID NO: 4532 - RNA, 21 nt, Artificial Sequence
  SARM1 targeting guide sequence portion
agaugccugccacgcuccgcg

SEQ ID NO: 4533 - RNA, 21 nt, Artificial Sequence
  SARM1 targeting guide sequence portion
agcaacggcacgaggcgcugc

SEQ ID NO: 4534 - RNA, 21 nt, Artificial Sequence
  SARM1 targeting guide sequence portion
agcacauguucaagcauucgg

SEQ ID NO: 4535 - RNA, 21 nt, Artificial Sequence
  SARM1 targeting guide sequence portion
agcagcgcgggguccgugcgg

SEQ ID NO: 4536 - RNA, 21 nt, Artificial Sequence
  SARM1 targeting guide sequence portion
agcagcucguccuccuuggag

SEQ ID NO: 4537 - RNA, 21 nt, Artificial Sequence
  SARM1 targeting guide sequence portion
agcauucggaggagacaugcc

SEQ ID NO: 4538 - RNA, 21 nt, Artificial Sequence
  SARM1 targeting guide sequence portion
agccacucggcugcgcgcuuc

SEQ ID NO: 4539 - RNA, 21 nt, Artificial Sequence
  SARM1 targeting guide sequence portion
agccagggccgcgggcccgac

SEQ ID NO: 4540 - RNA, 21 nt, Artificial Sequence
  SARM1 targeting guide sequence portion
agcccaaugcgcgccacgcgg

SEQ ID NO: 4541 - RNA, 21 nt, Artificial Sequence
  SARM1 targeting guide sequence portion
agccccgaugcacugcgccuc

SEQ ID NO: 4542 - RNA, 21 nt, Artificial Sequence
  SARM1 targeting guide sequence portion
agccgaagcagcucguccucc

SEQ ID NO: 4543 - RNA, 21 nt, Artificial Sequence
  SARM1 targeting guide sequence portion
agccgaguggcucuucccgcu

SEQ ID NO: 4544 - RNA, 21 nt, Artificial Sequence
  SARM1 targeting guide sequence portion
agccgcuuguggccucgcugg

SEQ ID NO: 4545 - RNA, 21 nt, Artificial Sequence
  SARM1 targeting guide sequence portion
agccucggcgcagagguagaa

SEQ ID NO: 4546 - RNA, 21 nt, Artificial Sequence
  SARM1 targeting guide sequence portion
agccucuggcaugucuccucc

SEQ ID NO: 4547 - RNA, 21 nt, Artificial Sequence
  SARM1 targeting guide sequence portion
agccugcaaggcaagaccaag

SEQ ID NO: 4548 - RNA, 21 nt, Artificial Sequence
  SARM1 targeting guide sequence portion
agcgacacaagccagggccgc

SEQ ID NO: 4549 - RNA, 21 nt, Artificial Sequence
  SARM1 targeting guide sequence portion
agcgacgcaugguagagaagc

SEQ ID NO: 4550 - RNA, 21 nt, Artificial Sequence
  SARM1 targeting guide sequence portion
agcgaggccacaagcggcucc

SEQ ID NO: 4551 - RNA, 21 nt, Artificial Sequence
  SARM1 targeting guide sequence portion
agcgccagcgcgcaguggcgc

SEQ ID NO: 4552 - RNA, 21 nt, Artificial Sequence
  SARM1 targeting guide sequence portion
agcgccagcgugcccgagcgc

SEQ ID NO: 4553 - RNA, 21 nt, Artificial Sequence
  SARM1 targeting guide sequence portion
agcgccucgugccguugcucg

SEQ ID NO: 4554 - RNA, 21 nt, Artificial Sequence
  SARM1 targeting guide sequence portion
agcgcgagguggagcgcucgg

SEQ ID NO: 4555 - RNA, 21 nt, Artificial Sequence
  SARM1 targeting guide sequence portion
agcgcgcagccgaguggcucu

SEQ ID NO: 4556 - RNA, 21 nt, Artificial Sequence
  SARM1 targeting guide sequence portion
agcgcgcaguggcgcagcagc

SEQ ID NO: 4557 - RNA, 21 nt, Artificial Sequence
  SARM1 targeting guide sequence portion
agcgcgcaguugcccagcgcc

SEQ ID NO: 4558 - RNA, 21 nt, Artificial Sequence
  SARM1 targeting guide sequence portion
agcgcgggguccgugcggcgg

SEQ ID NO: 4559 - RNA, 21 nt, Artificial Sequence
  SARM1 targeting guide sequence portion
agcgcuccaccucgcgcucca

SEQ ID NO: 4560 - RNA, 21 nt, Artificial Sequence
  SARM1 targeting guide sequence portion
agcgcucgggcacgcuggcgc

SEQ ID NO: 4561 - RNA, 21 nt, Artificial Sequence
  SARM1 targeting guide sequence portion
agcggccaggguccagcgagg

SEQ ID NO: 4562 - RNA, 21 nt, Artificial Sequence
  SARM1 targeting guide sequence portion
agcggcuccacgagcgccagc

SEQ ID NO: 4563 - RNA, 21 nt, Artificial Sequence
  SARM1 targeting guide sequence portion
agcgggaagagccacucggcu

SEQ ID NO: 4564 - RNA, 21 nt, Artificial Sequence
  SARM1 targeting guide sequence portion
agcgggcgaagcggccagggu

SEQ ID NO: 4565 - RNA, 21 nt, Artificial Sequence
  SARM1 targeting guide sequence portion
agcgguguuggcgacuaacaa

SEQ ID NO: 4566 - RNA, 21 nt, Artificial Sequence
  SARM1 targeting guide sequence portion
agcgguuagagucgagcaacg

SEQ ID NO: 4567 - RNA, 21 nt, Artificial Sequence
  SARM1 targeting guide sequence portion
agcgugcccgagcgcuccacc

SEQ ID NO: 4568 - RNA, 21 nt, Artificial Sequence
  SARM1 targeting guide sequence portion
agcguggcaggcaucuuggag

SEQ ID NO: 4569 - RNA, 21 nt, Artificial Sequence
  SARM1 targeting guide sequence portion
agcucguccuccuuggagaag

SEQ ID NO: 4570 - RNA, 21 nt, Artificial Sequence
  SARM1 targeting guide sequence portion
agcucuacggguucgcguucc

SEQ ID NO: 4571 - RNA, 21 nt, Artificial Sequence
  SARM1 targeting guide sequence portion
agcugcuucggcugcacgccu

SEQ ID NO: 4572 - RNA, 21 nt, Artificial Sequence
  SARM1 targeting guide sequence portion
agcuggcgcggagcguggcag

SEQ ID NO: 4573 - RNA, 21 nt, Artificial Sequence
  SARM1 targeting guide sequence portion
aggaacgcgaacccguagagc

SEQ ID NO: 4574 - RNA, 21 nt, Artificial Sequence
  SARM1 targeting guide sequence portion
aggacgagcugcuucggcugc

SEQ ID NO: 4575 - RNA, 21 nt, Artificial Sequence
  SARM1 targeting guide sequence portion
aggagacaugccagaggcugg

SEQ ID NO: 4576 - RNA, 21 nt, Artificial Sequence
  SARM1 targeting guide sequence portion
aggaggacgagcugcuucggc

SEQ ID NO: 4577 - RNA, 21 nt, Artificial Sequence
  SARM1 targeting guide sequence portion
aggagguggagcgcgaggugg

SEQ ID NO: 4578 - RNA, 21 nt, Artificial Sequence
  SARM1 targeting guide sequence portion
aggaucacgcccagcccaaug

SEQ ID NO: 4579 - RNA, 21 nt, Artificial Sequence
  SARM1 targeting guide sequence portion
aggcaggcgugcagccgaagc

SEQ ID NO: 4580 - RNA, 21 nt, Artificial Sequence
  SARM1 targeting guide sequence portion
aggcaucuuggagcacauguu

SEQ ID NO: 4581 - RNA, 21 nt, Artificial Sequence
  SARM1 targeting guide sequence portion
aggccacaagcggcuccacga

SEQ ID NO: 4582 - RNA, 21 nt, Artificial Sequence
  SARM1 targeting guide sequence portion
aggccgccggccgccaccagc

SEQ ID NO: 4583 - RNA, 21 nt, Artificial Sequence
  SARM1 targeting guide sequence portion
aggcgagcgggaagagccacu

SEQ ID NO: 4584 - RNA, 21 nt, Artificial Sequence
  SARM1 targeting guide sequence portion
aggcgcagugcaucggggcuu

SEQ ID NO: 4585 - RNA, 21 nt, Artificial Sequence
  SARM1 targeting guide sequence portion
aggcgcugcaggucgucgggc

SEQ ID NO: 4586 - RNA, 21 nt, Artificial Sequence
  SARM1 targeting guide sequence portion
aggcggugcagcgacgcaugg

SEQ ID NO: 4587 - RNA, 21 nt, Artificial Sequence
  SARM1 targeting guide sequence portion
aggcgugcagccgaagcagcu

SEQ ID NO: 4588 - RNA, 21 nt, Artificial Sequence
  SARM1 targeting guide sequence portion
aggcucuugauggcagccucg

SEQ ID NO: 4589 - RNA, 21 nt, Artificial Sequence
  SARM1 targeting guide sequence portion
aggcugccaucaagagccugc

SEQ ID NO: 4590 - RNA, 21 nt, Artificial Sequence
  SARM1 targeting guide sequence portion
aggcugguggcggccggcggc

SEQ ID NO: 4591 - RNA, 21 nt, Artificial Sequence
  SARM1 targeting guide sequence portion
agggccgcgggcccgacgacc

SEQ ID NO: 4592 - RNA, 21 nt, Artificial Sequence
  SARM1 targeting guide sequence portion
aggguccagcgaggccacaag

SEQ ID NO: 4593 - RNA, 21 nt, Artificial Sequence
  SARM1 targeting guide sequence portion
agguagaaagccccgaugcac

SEQ ID NO: 4594 - RNA, 21 nt, Artificial Sequence
  SARM1 targeting guide sequence portion
aggucgucgggcccgcggccc

SEQ ID NO: 4595 - RNA, 21 nt, Artificial Sequence
  SARM1 targeting guide sequence portion
agguggagcgcgagguggagc

SEQ ID NO: 4596 - RNA, 21 nt, Artificial Sequence
  SARM1 targeting guide sequence portion
agguggagcgcucgggcacgc

SEQ ID NO: 4597 - RNA, 21 nt, Artificial Sequence
  SARM1 targeting guide sequence portion
agguucaggaucacgcccagc

SEQ ID NO: 4598 - RNA, 21 nt, Artificial Sequence
  SARM1 targeting guide sequence portion
aguagcgguguuggcgacuaa

SEQ ID NO: 4599 - RNA, 21 nt, Artificial Sequence
  SARM1 targeting guide sequence portion
agucgagcaacggcacgaggc

SEQ ID NO: 4600 - RNA, 21 nt, Artificial Sequence
  SARM1 targeting guide sequence portion
agucgccaacaccgcuacugc

SEQ ID NO: 4601 - RNA, 21 nt, Artificial Sequence
  SARM1 targeting guide sequence portion
agugcaucggggcuuucuacc

SEQ ID NO: 4602 - RNA, 21 nt, Artificial Sequence
  SARM1 targeting guide sequence portion
aguggcgcagcagcgcggggu

SEQ ID NO: 4603 - RNA, 21 nt, Artificial Sequence
  SARM1 targeting guide sequence portion
aguggcucuucccgcucgccu

SEQ ID NO: 4604 - RNA, 21 nt, Artificial Sequence
  SARM1 targeting guide sequence portion
aguugcccagcgccagcgcgc

SEQ ID NO: 4605 - RNA, 21 nt, Artificial Sequence
  SARM1 targeting guide sequence portion
auacagcaccgcguccaggcc

SEQ ID NO: 4606 - RNA, 21 nt, Artificial Sequence
  SARM1 targeting guide sequence portion
aucaagagccugcaaggcaag

SEQ ID NO: 4607 - RNA, 21 nt, Artificial Sequence
  SARM1 targeting guide sequence portion
aucacgcccagcccaaugcgc

SEQ ID NO: 4608 - RNA, 21 nt, Artificial Sequence
  SARM1 targeting guide sequence portion
auccugaaccuggcgaaggaa

SEQ ID NO: 4609 - RNA, 21 nt, Artificial Sequence
  SARM1 targeting guide sequence portion
aucggggcuuucuaccucugc

SEQ ID NO: 4610 - RNA, 21 nt, Artificial Sequence
  SARM1 targeting guide sequence portion
aucuuggagcacauguucaag

SEQ ID NO: 4611 - RNA, 21 nt, Artificial Sequence
  SARM1 targeting guide sequence portion
augcacugcgccuccaagcgg

SEQ ID NO: 4612 - RNA, 21 nt, Artificial Sequence
  SARM1 targeting guide sequence portion
augccagaggcugguggcggc

SEQ ID NO: 4613 - RNA, 21 nt, Artificial Sequence
  SARM1 targeting guide sequence portion
augccugccacgcuccgcgcc

SEQ ID NO: 4614 - RNA, 21 nt, Artificial Sequence
  SARM1 targeting guide sequence portion
augcgucgcugcaccgccugg

SEQ ID NO: 4615 - RNA, 21 nt, Artificial Sequence
  SARM1 targeting guide sequence portion
augcuugaacaugugcuccaa

SEQ ID NO: 4616 - RNA, 21 nt, Artificial Sequence
  SARM1 targeting guide sequence portion
auggcagccucggcgcagagg

SEQ ID NO: 4617 - RNA, 21 nt, Artificial Sequence
  SARM1 targeting guide sequence portion
augguagagaagcgcgcagcc

SEQ ID NO: 4618 - RNA, 21 nt, Artificial Sequence
  SARM1 targeting guide sequence portion
augucuccuccgaaugcuuga

SEQ ID NO: 4619 - RNA, 21 nt, Artificial Sequence
  SARM1 targeting guide sequence portion
augugcuccaagaugccugcc

SEQ ID NO: 4620 - RNA, 21 nt, Artificial Sequence
  SARM1 targeting guide sequence portion
auguucaagcauucggaggag

SEQ ID NO: 4621 - RNA, 21 nt, Artificial Sequence
  SARM1 targeting guide sequence portion
auucggaggagacaugccaga

SEQ ID NO: 4622 - RNA, 21 nt, Artificial Sequence
  SARM1 targeting guide sequence portion
auugggcugggcgugauccug

SEQ ID NO: 4623 - RNA, 21 nt, Artificial Sequence
  SARM1 targeting guide sequence portion
auuggugccgccgcacggacc

SEQ ID NO: 4624 - RNA, 21 nt, Artificial Sequence
  SARM1 targeting guide sequence portion
caacaccgcuacugcgaggca

SEQ ID NO: 4625 - RNA, 21 nt, Artificial Sequence
  SARM1 targeting guide sequence portion
caacggcacgaggcgcugcag

SEQ ID NO: 4626 - RNA, 21 nt, Artificial Sequence
  SARM1 targeting guide sequence portion
caacugcgcgcugcacggggg

SEQ ID NO: 4627 - RNA, 21 nt, Artificial Sequence
  SARM1 targeting guide sequence portion
caagagccugcaaggcaagac

SEQ ID NO: 4628 - RNA, 21 nt, Artificial Sequence
  SARM1 targeting guide sequence portion
caagaugccugccacgcuccg

SEQ ID NO: 4629 - RNA, 21 nt, Artificial Sequence
  SARM1 targeting guide sequence portion
caagcauucggaggagacaug

SEQ ID NO: 4630 - RNA, 21 nt, Artificial Sequence
  SARM1 targeting guide sequence portion
caagccagggccgcgggcccg

SEQ ID NO: 4631 - RNA, 21 nt, Artificial Sequence
  SARM1 targeting guide sequence portion
caagcggcuccacgagcgcca

SEQ ID NO: 4632 - RNA, 21 nt, Artificial Sequence
  SARM1 targeting guide sequence portion
caagcgguuagagucgagcaa

SEQ ID NO: 4633 - RNA, 21 nt, Artificial Sequence
  SARM1 targeting guide sequence portion
caaggaggacgagcugcuucg

SEQ ID NO: 4634 - RNA, 21 nt, Artificial Sequence
  SARM1 targeting guide sequence portion
caaggagguggagcgcgaggu

SEQ ID NO: 4635 - RNA, 21 nt, Artificial Sequence
  SARM1 targeting guide sequence portion
caauacagcaccgcguccagg

SEQ ID NO: 4636 - RNA, 21 nt, Artificial Sequence
  SARM1 targeting guide sequence portion
caaugcgcgccacgcggucuc

SEQ ID NO: 4637 - RNA, 21 nt, Artificial Sequence
  SARM1 targeting guide sequence portion
cacaagccagggccgcgggcc

SEQ ID NO: 4638 - RNA, 21 nt, Artificial Sequence
  SARM1 targeting guide sequence portion
cacaagcggcuccacgagcgc

SEQ ID NO: 4639 - RNA, 21 nt, Artificial Sequence
  SARM1 targeting guide sequence portion
cacauguucaagcauucggag

SEQ ID NO: 4640 - RNA, 21 nt, Artificial Sequence
  SARM1 targeting guide sequence portion
caccaauacagcaccgcgucc

SEQ ID NO: 4641 - RNA, 21 nt, Artificial Sequence
  SARM1 targeting guide sequence portion
caccagacagcgggcgaagcg

SEQ ID NO: 4642 - RNA, 21 nt, Artificial Sequence
  SARM1 targeting guide sequence portion
caccagccucuggcaugucuc

SEQ ID NO: 4643 - RNA, 21 nt, Artificial Sequence
  SARM1 targeting guide sequence portion
cacccaccuuggucuugccuu

SEQ ID NO: 4644 - RNA, 21 nt, Artificial Sequence
  SARM1 targeting guide sequence portion
caccgccuggcccccgugcag

SEQ ID NO: 4645 - RNA, 21 nt, Artificial Sequence
  SARM1 targeting guide sequence portion
caccgcuacugcgaggcaggc

SEQ ID NO: 4646 - RNA, 21 nt, Artificial Sequence
  SARM1 targeting guide sequence portion
caccuccuuguuagucgccaa

SEQ ID NO: 4647 - RNA, 21 nt, Artificial Sequence
  SARM1 targeting guide sequence portion
caccucgcgcuccaccuccuu

SEQ ID NO: 4648 - RNA, 21 nt, Artificial Sequence
  SARM1 targeting guide sequence portion
caccuuggucuugccuugcag

SEQ ID NO: 4649 - RNA, 21 nt, Artificial Sequence
  SARM1 targeting guide sequence portion
cacgagcgccagcgugcccga

SEQ ID NO: 4650 - RNA, 21 nt, Artificial Sequence
  SARM1 targeting guide sequence portion
cacgaggcgcugcaggucguc

SEQ ID NO: 4651 - RNA, 21 nt, Artificial Sequence
  SARM1 targeting guide sequence portion
cacgcccagcccaaugcgcgc

SEQ ID NO: 4652 - RNA, 21 nt, Artificial Sequence
  SARM1 targeting guide sequence portion
cacgccugccucgcaguagcg

SEQ ID NO: 4653 - RNA, 21 nt, Artificial Sequence
  SARM1 targeting guide sequence portion
cacgcuccgcgccagcucuac

SEQ ID NO: 4654 - RNA, 21 nt, Artificial Sequence
  SARM1 targeting guide sequence portion
cacgcuggcgcucguggagcc

SEQ ID NO: 4655 - RNA, 21 nt, Artificial Sequence
  SARM1 targeting guide sequence portion
cacggaccccgcgcugcugcg

SEQ ID NO: 4656 - RNA, 21 nt, Artificial Sequence
  SARM1 targeting guide sequence portion
cacgggggccaggcggugcag

SEQ ID NO: 4657 - RNA, 21 nt, Artificial Sequence
  SARM1 targeting guide sequence portion
cacucggcugcgcgcuucucu

SEQ ID NO: 4658 - RNA, 21 nt, Artificial Sequence
  SARM1 targeting guide sequence portion
cacugcgccuccaagcgguua

SEQ ID NO: 4659 - RNA, 21 nt, Artificial Sequence
  SARM1 targeting guide sequence portion
cacugcgcgcuggcgcugggc

SEQ ID NO: 4660 - RNA, 21 nt, Artificial Sequence
  SARM1 targeting guide sequence portion
cagacagcgggcgaagcggcc

SEQ ID NO: 4661 - RNA, 21 nt, Artificial Sequence
  SARM1 targeting guide sequence portion
cagagaccgcguggcgcgcau

SEQ ID NO: 4662 - RNA, 21 nt, Artificial Sequence
  SARM1 targeting guide sequence portion
cagaggcugguggcggccggc

SEQ ID NO: 4663 - RNA, 21 nt, Artificial Sequence
  SARM1 targeting guide sequence portion
cagagguagaaagccccgaug

SEQ ID NO: 4664 - RNA, 21 nt, Artificial Sequence
  SARM1 targeting guide sequence portion
cagcagcgcgggguccgugcg

SEQ ID NO: 4665 - RNA, 21 nt, Artificial Sequence
  SARM1 targeting guide sequence portion
cagcccaaugcgcgccacgcg

SEQ ID NO: 4666 - RNA, 21 nt, Artificial Sequence
  SARM1 targeting guide sequence portion
cagccgaagcagcucguccuc

SEQ ID NO: 4667 - RNA, 21 nt, Artificial Sequence
  SARM1 targeting guide sequence portion
cagccgaguggcucuucccgc

SEQ ID NO: 4668 - RNA, 21 nt, Artificial Sequence
  SARM1 targeting guide sequence portion
cagccucggcgcagagguaga

SEQ ID NO: 4669 - RNA, 21 nt, Artificial Sequence
  SARM1 targeting guide sequence portion
cagccucuggcaugucuccuc

SEQ ID NO: 4670 - RNA, 21 nt, Artificial Sequence
  SARM1 targeting guide sequence portion
cagcgacacaagccagggccg

SEQ ID NO: 4671 - RNA, 21 nt, Artificial Sequence
  SARM1 targeting guide sequence portion
cagcgacgcaugguagagaag

SEQ ID NO: 4672 - RNA, 21 nt, Artificial Sequence
  SARM1 targeting guide sequence portion
cagcgaggccacaagcggcuc

SEQ ID NO: 4673 - RNA, 21 nt, Artificial Sequence
  SARM1 targeting guide sequence portion
cagcgccagcgcgcaguggcg

SEQ ID NO: 4674 - RNA, 21 nt, Artificial Sequence
  SARM1 targeting guide sequence portion
cagcgccucgugccguugcuc

SEQ ID NO: 4675 - RNA, 21 nt, Artificial Sequence
  SARM1 targeting guide sequence portion
cagcgcgcaguggcgcagcag

SEQ ID NO: 4676 - RNA, 21 nt, Artificial Sequence
  SARM1 targeting guide sequence portion
cagcgcgcaguugcccagcgc

SEQ ID NO: 4677 - RNA, 21 nt, Artificial Sequence
  SARM1 targeting guide sequence portion
cagcgcgggguccgugcggcg

SEQ ID NO: 4678 - RNA, 21 nt, Artificial Sequence
  SARM1 targeting guide sequence portion
cagcgggcgaagcggccaggg

SEQ ID NO: 4679 - RNA, 21 nt, Artificial Sequence
  SARM1 targeting guide sequence portion
cagcgugcccgagcgcuccac

SEQ ID NO: 4680 - RNA, 21 nt, Artificial Sequence
  SARM1 targeting guide sequence portion
cagcucguccuccuuggagaa

SEQ ID NO: 4681 - RNA, 21 nt, Artificial Sequence
  SARM1 targeting guide sequence portion
cagcucuacggguucgcguuc

SEQ ID NO: 4682 - RNA, 21 nt, Artificial Sequence
  SARM1 targeting guide sequence portion
caggaucacgcccagcccaau

SEQ ID NO: 4683 - RNA, 21 nt, Artificial Sequence
  SARM1 targeting guide sequence portion
caggcaucuuggagcacaugu

SEQ ID NO: 4684 - RNA, 21 nt, Artificial Sequence
  SARM1 targeting guide sequence portion
caggccgccggccgccaccag

SEQ ID NO: 4685 - RNA, 21 nt, Artificial Sequence
  SARM1 targeting guide sequence portion
caggcggugcagcgacgcaug

SEQ ID NO: 4686 - RNA, 21 nt, Artificial Sequence
  SARM1 targeting guide sequence portion
caggcgugcagccgaagcagc

SEQ ID NO: 4687 - RNA, 21 nt, Artificial Sequence
  SARM1 targeting guide sequence portion
caggcucuugauggcagccuc

SEQ ID NO: 4688 - RNA, 21 nt, Artificial Sequence
  SARM1 targeting guide sequence portion
cagggccgcgggcccgacgac

SEQ ID NO: 4689 - RNA, 21 nt, Artificial Sequence
  SARM1 targeting guide sequence portion
caggguccagcgaggccacaa

SEQ ID NO: 4690 - RNA, 21 nt, Artificial Sequence
  SARM1 targeting guide sequence portion
caggucgucgggcccgcggcc

SEQ ID NO: 4691 - RNA, 21 nt, Artificial Sequence
  SARM1 targeting guide sequence portion
cagguucaggaucacgcccag

SEQ ID NO: 4692 - RNA, 21 nt, Artificial Sequence
  SARM1 targeting guide sequence portion
caguagcgguguuggcgacua

SEQ ID NO: 4693 - RNA, 21 nt, Artificial Sequence
  SARM1 targeting guide sequence portion
cagugcaucggggcuuucuac

SEQ ID NO: 4694 - RNA, 21 nt, Artificial Sequence
  SARM1 targeting guide sequence portion
caguggcgcagcagcgcgggg

SEQ ID NO: 4695 - RNA, 21 nt, Artificial Sequence
  SARM1 targeting guide sequence portion
caguugcccagcgccagcgcg

SEQ ID NO: 4696 - RNA, 21 nt, Artificial Sequence
  SARM1 targeting guide sequence portion
caucaagagccugcaaggcaa

SEQ ID NO: 4697 - RNA, 21 nt, Artificial Sequence
  SARM1 targeting guide sequence portion
caucggggcuuucuaccucug

SEQ ID NO: 4698 - RNA, 21 nt, Artificial Sequence
  SARM1 targeting guide sequence portion
caucuuggagcacauguucaa

SEQ ID NO: 4699 - RNA, 21 nt, Artificial Sequence
  SARM1 targeting guide sequence portion
caugccagaggcugguggcgg

SEQ ID NO: 4700 - RNA, 21 nt, Artificial Sequence
  SARM1 targeting guide sequence portion
caugcgucgcugcaccgccug

SEQ ID NO: 4701 - RNA, 21 nt, Artificial Sequence
  SARM1 targeting guide sequence portion
caugguagagaagcgcgcagc

SEQ ID NO: 4702 - RNA, 21 nt, Artificial Sequence
  SARM1 targeting guide sequence portion
caugucuccuccgaaugcuug

SEQ ID NO: 4703 - RNA, 21 nt, Artificial Sequence
  SARM1 targeting guide sequence portion
caugugcuccaagaugccugc

SEQ ID NO: 4704 - RNA, 21 nt, Artificial Sequence
  SARM1 targeting guide sequence portion
cauguucaagcauucggagga

SEQ ID NO: 4705 - RNA, 21 nt, Artificial Sequence
  SARM1 targeting guide sequence portion
cauucggaggagacaugccag

SEQ ID NO: 4706 - RNA, 21 nt, Artificial Sequence
  SARM1 targeting guide sequence portion
cauugggcugggcgugauccu

SEQ ID NO: 4707 - RNA, 21 nt, Artificial Sequence
  SARM1 targeting guide sequence portion
ccaacaccgcuacugcgaggc

SEQ ID NO: 4708 - RNA, 21 nt, Artificial Sequence
  SARM1 targeting guide sequence portion
ccaagaugccugccacgcucc

SEQ ID NO: 4709 - RNA, 21 nt, Artificial Sequence
  SARM1 targeting guide sequence portion
ccaagcgguuagagucgagca

SEQ ID NO: 4710 - RNA, 21 nt, Artificial Sequence
  SARM1 targeting guide sequence portion
ccaaggaggacgagcugcuuc

SEQ ID NO: 4711 - RNA, 21 nt, Artificial Sequence
  SARM1 targeting guide sequence portion
ccaauacagcaccgcguccag

SEQ ID NO: 4712 - RNA, 21 nt, Artificial Sequence
  SARM1 targeting guide sequence portion
ccaaugcgcgccacgcggucu

SEQ ID NO: 4713 - RNA, 21 nt, Artificial Sequence
  SARM1 targeting guide sequence portion
ccacaagcggcuccacgagcg

SEQ ID NO: 4714 - RNA, 21 nt, Artificial Sequence
  SARM1 targeting guide sequence portion
ccaccagacagcgggcgaagc

SEQ ID NO: 4715 - RNA, 21 nt, Artificial Sequence
  SARM1 targeting guide sequence portion
ccaccagccucuggcaugucu

SEQ ID NO: 4716 - RNA, 21 nt, Artificial Sequence
  SARM1 targeting guide sequence portion
ccaccuccuuguuagucgcca

SEQ ID NO: 4717 - RNA, 21 nt, Artificial Sequence
  SARM1 targeting guide sequence portion
ccaccucgcgcuccaccuccu

SEQ ID NO: 4718 - RNA, 21 nt, Artificial Sequence
  SARM1 targeting guide sequence portion
ccaccuuggucuugccuugca

SEQ ID NO: 4719 - RNA, 21 nt, Artificial Sequence
  SARM1 targeting guide sequence portion
ccacgagcgccagcgugcccg

SEQ ID NO: 4720 - RNA, 21 nt, Artificial Sequence
  SARM1 targeting guide sequence portion
ccacgcuccgcgccagcucua

SEQ ID NO: 4721 - RNA, 21 nt, Artificial Sequence
  SARM1 targeting guide sequence portion
ccacucggcugcgcgcuucuc

SEQ ID NO: 4722 - RNA, 21 nt, Artificial Sequence
  SARM1 targeting guide sequence portion
ccacugcgcgcuggcgcuggg

SEQ ID NO: 4723 - RNA, 21 nt, Artificial Sequence
  SARM1 targeting guide sequence portion
ccagacagcgggcgaagcggc

SEQ ID NO: 4724 - RNA, 21 nt, Artificial Sequence
  SARM1 targeting guide sequence portion
ccagaggcugguggcggccgg

SEQ ID NO: 4725 - RNA, 21 nt, Artificial Sequence
  SARM1 targeting guide sequence portion
ccagcccaaugcgcgccacgc

SEQ ID NO: 4726 - RNA, 21 nt, Artificial Sequence
  SARM1 targeting guide sequence portion
ccagccucuggcaugucuccu

SEQ ID NO: 4727 - RNA, 21 nt, Artificial Sequence
  SARM1 targeting guide sequence portion
ccagcgacacaagccagggcc

SEQ ID NO: 4728 - RNA, 21 nt, Artificial Sequence
  SARM1 targeting guide sequence portion
ccagcgaggccacaagcggcu

SEQ ID NO: 4729 - RNA, 21 nt, Artificial Sequence
  SARM1 targeting guide sequence portion
ccagcgccagcgcgcaguggc

SEQ ID NO: 4730 - RNA, 21 nt, Artificial Sequence
  SARM1 targeting guide sequence portion
ccagcgcgcaguggcgcagca

SEQ ID NO: 4731 - RNA, 21 nt, Artificial Sequence
  SARM1 targeting guide sequence portion
ccagcgugcccgagcgcucca

SEQ ID NO: 4732 - RNA, 21 nt, Artificial Sequence
  SARM1 targeting guide sequence portion
ccagcucuacggguucgcguu

SEQ ID NO: 4733 - RNA, 21 nt, Artificial Sequence
  SARM1 targeting guide sequence portion
ccaggccgccggccgccacca

SEQ ID NO: 4734 - RNA, 21 nt, Artificial Sequence
  SARM1 targeting guide sequence portion
ccaggcggugcagcgacgcau

SEQ ID NO: 4735 - RNA, 21 nt, Artificial Sequence
  SARM1 targeting guide sequence portion
ccagggccgcgggcccgacga

SEQ ID NO: 4736 - RNA, 21 nt, Artificial Sequence
  SARM1 targeting guide sequence portion
ccaggguccagcgaggccaca

SEQ ID NO: 4737 - RNA, 21 nt, Artificial Sequence
  SARM1 targeting guide sequence portion
ccagguucaggaucacgccca

SEQ ID NO: 4738 - RNA, 21 nt, Artificial Sequence
  SARM1 targeting guide sequence portion
ccaucaagagccugcaaggca

SEQ ID NO: 4739 - RNA, 21 nt, Artificial Sequence
  SARM1 targeting guide sequence portion
ccaugcgucgcugcaccgccu

SEQ ID NO: 4740 - RNA, 21 nt, Artificial Sequence
  SARM1 targeting guide sequence portion
cccaaugcgcgccacgcgguc

SEQ ID NO: 4741 - RNA, 21 nt, Artificial Sequence
  SARM1 targeting guide sequence portion
cccaccuuggucuugccuugc

SEQ ID NO: 4742 - RNA, 21 nt, Artificial Sequence
  SARM1 targeting guide sequence portion
cccagcccaaugcgcgccacg

SEQ ID NO: 4743 - RNA, 21 nt, Artificial Sequence
  SARM1 targeting guide sequence portion
cccagcgccagcgcgcagugg

SEQ ID NO: 4744 - RNA, 21 nt, Artificial Sequence
  SARM1 targeting guide sequence portion
cccccgugcagcgcgcaguug

SEQ ID NO: 4745 - RNA, 21 nt, Artificial Sequence
  SARM1 targeting guide sequence portion
ccccgaugcacugcgccucca

SEQ ID NO: 4746 - RNA, 21 nt, Artificial Sequence
  SARM1 targeting guide sequence portion
ccccgcgcugcugcgccacug

SEQ ID NO: 4747 - RNA, 21 nt, Artificial Sequence
  SARM1 targeting guide sequence portion
ccccgugcagcgcgcaguugc

SEQ ID NO: 4748 - RNA, 21 nt, Artificial Sequence
  SARM1 targeting guide sequence portion
cccgacgaccugcagcgccuc

SEQ ID NO: 4749 - RNA, 21 nt, Artificial Sequence
  SARM1 targeting guide sequence portion
cccgagcgcuccaccucgcgc

SEQ ID NO: 4750 - RNA, 21 nt, Artificial Sequence
  SARM1 targeting guide sequence portion
cccgaugcacugcgccuccaa

SEQ ID NO: 4751 - RNA, 21 nt, Artificial Sequence
  SARM1 targeting guide sequence portion
cccgcgcugcugcgccacugc

SEQ ID NO: 4752 - RNA, 21 nt, Artificial Sequence
  SARM1 targeting guide sequence portion
cccgcggcccuggcuuguguc

SEQ ID NO: 4753 - RNA, 21 nt, Artificial Sequence
  SARM1 targeting guide sequence portion
cccgcucgccuucuccaagga

SEQ ID NO: 4754 - RNA, 21 nt, Artificial Sequence
  SARM1 targeting guide sequence portion
cccgcugucugguggacgcca

SEQ ID NO: 4755 - RNA, 21 nt, Artificial Sequence
  SARM1 targeting guide sequence portion
cccguagagcuggcgcggagc

SEQ ID NO: 4756 - RNA, 21 nt, Artificial Sequence
  SARM1 targeting guide sequence portion
cccgugcagcgcgcaguugcc

SEQ ID NO: 4757 - RNA, 21 nt, Artificial Sequence
  SARM1 targeting guide sequence portion
cccuggccgcuucgcccgcug

SEQ ID NO: 4758 - RNA, 21 nt, Artificial Sequence
  SARM1 targeting guide sequence portion
cccuggcuugugucgcuggcg

SEQ ID NO: 4759 - RNA, 21 nt, Artificial Sequence
  SARM1 targeting guide sequence portion
ccgaagcagcucguccuccuu

SEQ ID NO: 4760 - RNA, 21 nt, Artificial Sequence
  SARM1 targeting guide sequence portion
ccgaaugcuugaacaugugcu

SEQ ID NO: 4761 - RNA, 21 nt, Artificial Sequence
  SARM1 targeting guide sequence portion
ccgacgaccugcagcgccucg

SEQ ID NO: 4762 - RNA, 21 nt, Artificial Sequence
  SARM1 targeting guide sequence portion
ccgagcgcuccaccucgcgcu

SEQ ID NO: 4763 - RNA, 21 nt, Artificial Sequence
  SARM1 targeting guide sequence portion
ccgaggcugccaucaagagcc

SEQ ID NO: 4764 - RNA, 21 nt, Artificial Sequence
  SARM1 targeting guide sequence portion
ccgaguggcucuucccgcucg

SEQ ID NO: 4765 - RNA, 21 nt, Artificial Sequence
  SARM1 targeting guide sequence portion
ccgaugcacugcgccuccaag

SEQ ID NO: 4766 - RNA, 21 nt, Artificial Sequence
  SARM1 targeting guide sequence portion
ccgcacggaccccgcgcugcu

SEQ ID NO: 4767 - RNA, 21 nt, Artificial Sequence
  SARM1 targeting guide sequence portion
ccgccaccagccucuggcaug

SEQ ID NO: 4768 - RNA, 21 nt, Artificial Sequence
  SARM1 targeting guide sequence portion
ccgccggccgccaccagccuc

SEQ ID NO: 4769 - RNA, 21 nt, Artificial Sequence
  SARM1 targeting guide sequence portion
ccgccuggcccccgugcagcg

SEQ ID NO: 4770 - RNA, 21 nt, Artificial Sequence
  SARM1 targeting guide sequence portion
ccgcgccagcucuacggguuc

SEQ ID NO: 4771 - RNA, 21 nt, Artificial Sequence
  SARM1 targeting guide sequence portion
ccgcgcugcugcgccacugcg

SEQ ID NO: 4772 - RNA, 21 nt, Artificial Sequence
  SARM1 targeting guide sequence portion
ccgcggcccuggcuugugucg

SEQ ID NO: 4773 - RNA, 21 nt, Artificial Sequence
  SARM1 targeting guide sequence portion
ccgcgggcccgacgaccugca

SEQ ID NO: 4774 - RNA, 21 nt, Artificial Sequence
  SARM1 targeting guide sequence portion
ccgcguggcgcgcauugggcu

SEQ ID NO: 4775 - RNA, 21 nt, Artificial Sequence
  SARM1 targeting guide sequence portion
ccgcuacugcgaggcaggcgu

SEQ ID NO: 4776 - RNA, 21 nt, Artificial Sequence
  SARM1 targeting guide sequence portion
ccgcucgccuucuccaaggag

SEQ ID NO: 4777 - RNA, 21 nt, Artificial Sequence
  SARM1 targeting guide sequence portion
ccgcugucugguggacgccag

SEQ ID NO: 4778 - RNA, 21 nt, Artificial Sequence
  SARM1 targeting guide sequence portion
ccgcuucgcccgcugucuggu

SEQ ID NO: 4779 - RNA, 21 nt, Artificial Sequence
  SARM1 targeting guide sequence portion
ccgcuuggaggcgcagugcau

SEQ ID NO: 4780 - RNA, 21 nt, Artificial Sequence
  SARM1 targeting guide sequence portion
ccgcuuguggccucgcuggac

SEQ ID NO: 4781 - RNA, 21 nt, Artificial Sequence
  SARM1 targeting guide sequence portion
ccggccgccaccagccucugg

SEQ ID NO: 4782 - RNA, 21 nt, Artificial Sequence
  SARM1 targeting guide sequence portion
ccggcggccuggacgcggugc

SEQ ID NO: 4783 - RNA, 21 nt, Artificial Sequence
  SARM1 targeting guide sequence portion
ccguagagcuggcgcggagcg

SEQ ID NO: 4784 - RNA, 21 nt, Artificial Sequence
  SARM1 targeting guide sequence portion
ccgugcagcgcgcaguugccc

SEQ ID NO: 4785 - RNA, 21 nt, Artificial Sequence
  SARM1 targeting guide sequence portion
ccgugcggcggcaccaauaca

SEQ ID NO: 4786 - RNA, 21 nt, Artificial Sequence
  SARM1 targeting guide sequence portion
ccguugcucgacucuaaccgc

SEQ ID NO: 4787 - RNA, 21 nt, Artificial Sequence
  SARM1 targeting guide sequence portion
ccuccaagcgguuagagucga

SEQ ID NO: 4788 - RNA, 21 nt, Artificial Sequence
  SARM1 targeting guide sequence portion
ccuccgaaugcuugaacaugu

SEQ ID NO: 4789 - RNA, 21 nt, Artificial Sequence
  SARM1 targeting guide sequence portion
ccuccuuggagaaggcgagcg

SEQ ID NO: 4790 - RNA, 21 nt, Artificial Sequence
  SARM1 targeting guide sequence portion
ccuccuuguuagucgccaaca

SEQ ID NO: 4791 - RNA, 21 nt, Artificial Sequence
  SARM1 targeting guide sequence portion
ccucgcaguagcgguguuggc

SEQ ID NO: 4792 - RNA, 21 nt, Artificial Sequence
  SARM1 targeting guide sequence portion
ccucgcgcuccaccuccuugu

SEQ ID NO: 4793 - RNA, 21 nt, Artificial Sequence
  SARM1 targeting guide sequence portion
ccucgcuggacccuggccgcu

SEQ ID NO: 4794 - RNA, 21 nt, Artificial Sequence
  SARM1 targeting guide sequence portion
ccucggcgcagagguagaaag

SEQ ID NO: 4795 - RNA, 21 nt, Artificial Sequence
  SARM1 targeting guide sequence portion
ccucgugccguugcucgacuc

SEQ ID NO: 4796 - RNA, 21 nt, Artificial Sequence
  SARM1 targeting guide sequence portion
ccucugcgccgaggcugccau

SEQ ID NO: 4797 - RNA, 21 nt, Artificial Sequence
  SARM1 targeting guide sequence portion
ccucuggcaugucuccuccga

SEQ ID NO: 4798 - RNA, 21 nt, Artificial Sequence
  SARM1 targeting guide sequence portion
ccugaaccuggcgaaggaacg

SEQ ID NO: 4799 - RNA, 21 nt, Artificial Sequence
  SARM1 targeting guide sequence portion
ccugcagcgccucgugccguu

SEQ ID NO: 4800 - RNA, 21 nt, Artificial Sequence
  SARM1 targeting guide sequence portion
ccugccacgcuccgcgccagc

SEQ ID NO: 4801 - RNA, 21 nt, Artificial Sequence
  SARM1 targeting guide sequence portion
ccugccucgcaguagcggugu

SEQ ID NO: 4802 - RNA, 21 nt, Artificial Sequence
  SARM1 targeting guide sequence portion
ccuggacgcggugcuguauug

SEQ ID NO: 4803 - RNA, 21 nt, Artificial Sequence
  SARM1 targeting guide sequence portion
ccuggcccccgugcagcgcgc

SEQ ID NO: 4804 - RNA, 21 nt, Artificial Sequence
  SARM1 targeting guide sequence portion
ccuggccgcuucgcccgcugu

SEQ ID NO: 4805 - RNA, 21 nt, Artificial Sequence
  SARM1 targeting guide sequence portion
ccuggcgaaggaacgcgaacc

SEQ ID NO: 4806 - RNA, 21 nt, Artificial Sequence
  SARM1 targeting guide sequence portion
ccuggcuugugucgcuggcgu

SEQ ID NO: 4807 - RNA, 21 nt, Artificial Sequence
  SARM1 targeting guide sequence portion
ccuucgccagguucaggauca

SEQ ID NO: 4808 - RNA, 21 nt, Artificial Sequence
  SARM1 targeting guide sequence portion
ccuucuccaaggaggacgagc

SEQ ID NO: 4809 - RNA, 21 nt, Artificial Sequence
  SARM1 targeting guide sequence portion
ccuugcaggcucuugauggca

SEQ ID NO: 4810 - RNA, 21 nt, Artificial Sequence
  SARM1 targeting guide sequence portion
ccuuggagaaggcgagcggga

SEQ ID NO: 4811 - RNA, 21 nt, Artificial Sequence
  SARM1 targeting guide sequence portion
ccuuggucuugccuugcaggc

SEQ ID NO: 4812 - RNA, 21 nt, Artificial Sequence
  SARM1 targeting guide sequence portion
ccuuguuagucgccaacaccg

SEQ ID NO: 4813 - RNA, 21 nt, Artificial Sequence
  SARM1 targeting guide sequence portion
cgaacccguagagcuggcgcg

SEQ ID NO: 4814 - RNA, 21 nt, Artificial Sequence
  SARM1 targeting guide sequence portion
cgaagcagcucguccuccuug

SEQ ID NO: 4815 - RNA, 21 nt, Artificial Sequence
  SARM1 targeting guide sequence portion
cgaagcggccaggguccagcg

SEQ ID NO: 4816 - RNA, 21 nt, Artificial Sequence
  SARM1 targeting guide sequence portion
cgaaggaacgcgaacccguag

SEQ ID NO: 4817 - RNA, 21 nt, Artificial Sequence
  SARM1 targeting guide sequence portion
cgaaugcuugaacaugugcuc

SEQ ID NO: 4818 - RNA, 21 nt, Artificial Sequence
  SARM1 targeting guide sequence portion
cgacacaagccagggccgcgg

SEQ ID NO: 4819 - RNA, 21 nt, Artificial Sequence
  SARM1 targeting guide sequence portion
cgaccugcagcgccucgugcc

SEQ ID NO: 4820 - RNA, 21 nt, Artificial Sequence
  SARM1 targeting guide sequence portion
cgacgaccugcagcgccucgu

SEQ ID NO: 4821 - RNA, 21 nt, Artificial Sequence
  SARM1 targeting guide sequence portion
cgacgcaugguagagaagcgc

SEQ ID NO: 4822 - RNA, 21 nt, Artificial Sequence
  SARM1 targeting guide sequence portion
cgacuaacaaggagguggagc

SEQ ID NO: 4823 - RNA, 21 nt, Artificial Sequence
  SARM1 targeting guide sequence portion
cgacucuaaccgcuuggaggc

SEQ ID NO: 4824 - RNA, 21 nt, Artificial Sequence
  SARM1 targeting guide sequence portion
cgagcaacggcacgaggcgcu

SEQ ID NO: 4825 - RNA, 21 nt, Artificial Sequence
  SARM1 targeting guide sequence portion
cgagcgccagcgugcccgagc

SEQ ID NO: 4826 - RNA, 21 nt, Artificial Sequence
  SARM1 targeting guide sequence portion
cgagcgcuccaccucgcgcuc

SEQ ID NO: 4827 - RNA, 21 nt, Artificial Sequence
  SARM1 targeting guide sequence portion
cgagcgggaagagccacucgg

SEQ ID NO: 4828 - RNA, 21 nt, Artificial Sequence
  SARM1 targeting guide sequence portion
cgagcugcuucggcugcacgc

SEQ ID NO: 4829 - RNA, 21 nt, Artificial Sequence
  SARM1 targeting guide sequence portion
cgaggcaggcgugcagccgaa

SEQ ID NO: 4830 - RNA, 21 nt, Artificial Sequence
  SARM1 targeting guide sequence portion
cgaggccacaagcggcuccac

SEQ ID NO: 4831 - RNA, 21 nt, Artificial Sequence
  SARM1 targeting guide sequence portion
cgaggcgcugcaggucgucgg

SEQ ID NO: 4832 - RNA, 21 nt, Artificial Sequence
  SARM1 targeting guide sequence portion
cgaggcugccaucaagagccu

SEQ ID NO: 4833 - RNA, 21 nt, Artificial Sequence
  SARM1 targeting guide sequence portion
cgagguggagcgcucgggcac

SEQ ID NO: 4834 - RNA, 21 nt, Artificial Sequence
  SARM1 targeting guide sequence portion
cgaguggcucuucccgcucgc

SEQ ID NO: 4835 - RNA, 21 nt, Artificial Sequence
  SARM1 targeting guide sequence portion
cgaugcacugcgccuccaagc

SEQ ID NO: 4836 - RNA, 21 nt, Artificial Sequence
  SARM1 targeting guide sequence portion
cgcacggaccccgcgcugcug

SEQ ID NO: 4837 - RNA, 21 nt, Artificial Sequence
  SARM1 targeting guide sequence portion
cgcagagguagaaagccccga

SEQ ID NO: 4838 - RNA, 21 nt, Artificial Sequence
  SARM1 targeting guide sequence portion
cgcagccgaguggcucuuccc

SEQ ID NO: 4839 - RNA, 21 nt, Artificial Sequence
  SARM1 targeting guide sequence portion
cgcaguagcgguguuggcgac

SEQ ID NO: 4840 - RNA, 21 nt, Artificial Sequence
  SARM1 targeting guide sequence portion
cgcagugcaucggggcuuucu

SEQ ID NO: 4841 - RNA, 21 nt, Artificial Sequence
  SARM1 targeting guide sequence portion
cgcaguggcgcagcagcgcgg

SEQ ID NO: 4842 - RNA, 21 nt, Artificial Sequence
  SARM1 targeting guide sequence portion
cgcaguugcccagcgccagcg

SEQ ID NO: 4843 - RNA, 21 nt, Artificial Sequence
  SARM1 targeting guide sequence portion
cgcaugguagagaagcgcgca

SEQ ID NO: 4844 - RNA, 21 nt, Artificial Sequence
  SARM1 targeting guide sequence portion
cgcauugggcugggcgugauc

SEQ ID NO: 4845 - RNA, 21 nt, Artificial Sequence
  SARM1 targeting guide sequence portion
cgccaacaccgcuacugcgag

SEQ ID NO: 4846 - RNA, 21 nt, Artificial Sequence
  SARM1 targeting guide sequence portion
cgccaccagccucuggcaugu

SEQ ID NO: 4847 - RNA, 21 nt, Artificial Sequence
  SARM1 targeting guide sequence portion
cgccacugcgcgcuggcgcug

SEQ ID NO: 4848 - RNA, 21 nt, Artificial Sequence
  SARM1 targeting guide sequence portion
cgccagcgacacaagccaggg

SEQ ID NO: 4849 - RNA, 21 nt, Artificial Sequence
  SARM1 targeting guide sequence portion
cgccagcgcgcaguggcgcag

SEQ ID NO: 4850 - RNA, 21 nt, Artificial Sequence
  SARM1 targeting guide sequence portion
cgccagcgugcccgagcgcuc

SEQ ID NO: 4851 - RNA, 21 nt, Artificial Sequence
  SARM1 targeting guide sequence portion
cgccagcucuacggguucgcg

SEQ ID NO: 4852 - RNA, 21 nt, Artificial Sequence
  SARM1 targeting guide sequence portion
cgccagguucaggaucacgcc

SEQ ID NO: 4853 - RNA, 21 nt, Artificial Sequence
  SARM1 targeting guide sequence portion
cgcccagcccaaugcgcgcca

SEQ ID NO: 4854 - RNA, 21 nt, Artificial Sequence
  SARM1 targeting guide sequence portion
cgcccgcugucugguggacgc

SEQ ID NO: 4855 - RNA, 21 nt, Artificial Sequence
  SARM1 targeting guide sequence portion
cgccgaggcugccaucaagag

SEQ ID NO: 4856 - RNA, 21 nt, Artificial Sequence
  SARM1 targeting guide sequence portion
cgccggccgccaccagccucu

SEQ ID NO: 4857 - RNA, 21 nt, Artificial Sequence
  SARM1 targeting guide sequence portion
cgccuccaagcgguuagaguc

SEQ ID NO: 4858 - RNA, 21 nt, Artificial Sequence
  SARM1 targeting guide sequence portion
cgccucgugccguugcucgac

SEQ ID NO: 4859 - RNA, 21 nt, Artificial Sequence
  SARM1 targeting guide sequence portion
cgccugccucgcaguagcggu

SEQ ID NO: 4860 - RNA, 21 nt, Artificial Sequence
  SARM1 targeting guide sequence portion
cgccuggcccccgugcagcgc

SEQ ID NO: 4861 - RNA, 21 nt, Artificial Sequence
  SARM1 targeting guide sequence portion
cgccuucuccaaggaggacga

SEQ ID NO: 4862 - RNA, 21 nt, Artificial Sequence
  SARM1 targeting guide sequence portion
cgcgaacccguagagcuggcg

SEQ ID NO: 4863 - RNA, 21 nt, Artificial Sequence
  SARM1 targeting guide sequence portion
cgcgagguggagcgcucgggc

SEQ ID NO: 4864 - RNA, 21 nt, Artificial Sequence
  SARM1 targeting guide sequence portion
cgcgcagccgaguggcucuuc

SEQ ID NO: 4865 - RNA, 21 nt, Artificial Sequence
  SARM1 targeting guide sequence portion
cgcgcaguggcgcagcagcgc

SEQ ID NO: 4866 - RNA, 21 nt, Artificial Sequence
  SARM1 targeting guide sequence portion
cgcgcaguugcccagcgccag

SEQ ID NO: 4867 - RNA, 21 nt, Artificial Sequence
  SARM1 targeting guide sequence portion
cgcgcauugggcugggcguga

SEQ ID NO: 4868 - RNA, 21 nt, Artificial Sequence
  SARM1 targeting guide sequence portion
cgcgccagcucuacggguucg

SEQ ID NO: 4869 - RNA, 21 nt, Artificial Sequence
  SARM1 targeting guide sequence portion
cgcgcuccaccuccuuguuag

SEQ ID NO: 4870 - RNA, 21 nt, Artificial Sequence
  SARM1 targeting guide sequence portion
cgcgcugcacgggggccaggc

SEQ ID NO: 4871 - RNA, 21 nt, Artificial Sequence
  SARM1 targeting guide sequence portion
cgcgcugcugcgccacugcgc

SEQ ID NO: 4872 - RNA, 21 nt, Artificial Sequence
  SARM1 targeting guide sequence portion
cgcgcuggcgcugggcaacug

SEQ ID NO: 4873 - RNA, 21 nt, Artificial Sequence
  SARM1 targeting guide sequence portion
cgcgcuucucuaccaugcguc

SEQ ID NO: 4874 - RNA, 21 nt, Artificial Sequence
  SARM1 targeting guide sequence portion
cgcggagcguggcaggcaucu

SEQ ID NO: 4875 - RNA, 21 nt, Artificial Sequence
  SARM1 targeting guide sequence portion
cgcggcccuggcuugugucgc

SEQ ID NO: 4876 - RNA, 21 nt, Artificial Sequence
  SARM1 targeting guide sequence portion
cgcgggcccgacgaccugcag

SEQ ID NO: 4877 - RNA, 21 nt, Artificial Sequence
  SARM1 targeting guide sequence portion
cgcgggguccgugcggcggca

SEQ ID NO: 4878 - RNA, 21 nt, Artificial Sequence
  SARM1 targeting guide sequence portion
cgcggugcuguauuggugccg

SEQ ID NO: 4879 - RNA, 21 nt, Artificial Sequence
  SARM1 targeting guide sequence portion
cgcguggcgcgcauugggcug

SEQ ID NO: 4880 - RNA, 21 nt, Artificial Sequence
  SARM1 targeting guide sequence portion
cgcguuccuucgccagguuca

SEQ ID NO: 4881 - RNA, 21 nt, Artificial Sequence
  SARM1 targeting guide sequence portion
cgcuacugcgaggcaggcgug

SEQ ID NO: 4882 - RNA, 21 nt, Artificial Sequence
  SARM1 targeting guide sequence portion
cgcuccaccuccuuguuaguc

SEQ ID NO: 4883 - RNA, 21 nt, Artificial Sequence
  SARM1 targeting guide sequence portion
cgcuccaccucgcgcuccacc

SEQ ID NO: 4884 - RNA, 21 nt, Artificial Sequence
  SARM1 targeting guide sequence portion
cgcuccgcgccagcucuacgg

SEQ ID NO: 4885 - RNA, 21 nt, Artificial Sequence
  SARM1 targeting guide sequence portion
cgcucgccuucuccaaggagg

SEQ ID NO: 4886 - RNA, 21 nt, Artificial Sequence
  SARM1 targeting guide sequence portion
cgcucgggcacgcuggcgcuc

SEQ ID NO: 4887 - RNA, 21 nt, Artificial Sequence
  SARM1 targeting guide sequence portion
cgcucguggagccgcuugugg

SEQ ID NO: 4888 - RNA, 21 nt, Artificial Sequence
  SARM1 targeting guide sequence portion
cgcugcaccgccuggcccccg

SEQ ID NO: 4889 - RNA, 21 nt, Artificial Sequence
  SARM1 targeting guide sequence portion
cgcugcacgggggccaggcgg

SEQ ID NO: 4890 - RNA, 21 nt, Artificial Sequence
  SARM1 targeting guide sequence portion
cgcugcugcgccacugcgcgc

SEQ ID NO: 4891 - RNA, 21 nt, Artificial Sequence
  SARM1 targeting guide sequence portion
cgcuggacccuggccgcuucg

SEQ ID NO: 4892 - RNA, 21 nt, Artificial Sequence
  SARM1 targeting guide sequence portion
cgcuggcgcucguggagccgc

SEQ ID NO: 4893 - RNA, 21 nt, Artificial Sequence
  SARM1 targeting guide sequence portion
cgcuggcgcugggcaacugcg

SEQ ID NO: 4894 - RNA, 21 nt, Artificial Sequence
  SARM1 targeting guide sequence portion
cgcuggcguccaccagacagc

SEQ ID NO: 4895 - RNA, 21 nt, Artificial Sequence
  SARM1 targeting guide sequence portion
cgcugggcaacugcgcgcugc

SEQ ID NO: 4896 - RNA, 21 nt, Artificial Sequence
  SARM1 targeting guide sequence portion
cgcugucugguggacgccagc

SEQ ID NO: 4897 - RNA, 21 nt, Artificial Sequence
  SARM1 targeting guide sequence portion
cgcuucgcccgcugucuggug

SEQ ID NO: 4898 - RNA, 21 nt, Artificial Sequence
  SARM1 targeting guide sequence portion
cgcuucucuaccaugcgucgc

SEQ ID NO: 4899 - RNA, 21 nt, Artificial Sequence
  SARM1 targeting guide sequence portion
cgcuuggaggcgcagugcauc

SEQ ID NO: 4900 - RNA, 21 nt, Artificial Sequence
  SARM1 targeting guide sequence portion
cgcuuguggccucgcuggacc

SEQ ID NO: 4901 - RNA, 21 nt, Artificial Sequence
  SARM1 targeting guide sequence portion
cggaccccgcgcugcugcgcc

SEQ ID NO: 4902 - RNA, 21 nt, Artificial Sequence
  SARM1 targeting guide sequence portion
cggagcguggcaggcaucuug

SEQ ID NO: 4903 - RNA, 21 nt, Artificial Sequence
  SARM1 targeting guide sequence portion
cggaggagacaugccagaggc

SEQ ID NO: 4904 - RNA, 21 nt, Artificial Sequence
  SARM1 targeting guide sequence portion
cggcaccaauacagcaccgcg

SEQ ID NO: 4905 - RNA, 21 nt, Artificial Sequence
  SARM1 targeting guide sequence portion
cggcacgaggcgcugcagguc

SEQ ID NO: 4906 - RNA, 21 nt, Artificial Sequence
  SARM1 targeting guide sequence portion
cggccaggguccagcgaggcc

SEQ ID NO: 4907 - RNA, 21 nt, Artificial Sequence
  SARM1 targeting guide sequence portion
cggcccuggcuugugucgcug

SEQ ID NO: 4908 - RNA, 21 nt, Artificial Sequence
  SARM1 targeting guide sequence portion
cggccgccaccagccucuggc

SEQ ID NO: 4909 - RNA, 21 nt, Artificial Sequence
  SARM1 targeting guide sequence portion
cggccggcggccuggacgcgg

SEQ ID NO: 4910 - RNA, 21 nt, Artificial Sequence
  SARM1 targeting guide sequence portion
cggccuggacgcggugcugua

SEQ ID NO: 4911 - RNA, 21 nt, Artificial Sequence
  SARM1 targeting guide sequence portion
cggcgcagagguagaaagccc

SEQ ID NO: 4912 - RNA, 21 nt, Artificial Sequence
  SARM1 targeting guide sequence portion
cggcggcaccaauacagcacc

SEQ ID NO: 4913 - RNA, 21 nt, Artificial Sequence
  SARM1 targeting guide sequence portion
cggcggccuggacgcggugcu

SEQ ID NO: 4914 - RNA, 21 nt, Artificial Sequence
  SARM1 targeting guide sequence portion
cggcuccacgagcgccagcgu

SEQ ID NO: 4915 - RNA, 21 nt, Artificial Sequence
  SARM1 targeting guide sequence portion
cggcugcacgccugccucgca

SEQ ID NO: 4916 - RNA, 21 nt, Artificial Sequence
  SARM1 targeting guide sequence portion
cggcugcgcgcuucucuacca

SEQ ID NO: 4917 - RNA, 21 nt, Artificial Sequence
  SARM1 targeting guide sequence portion
cgggaagagccacucggcugc

SEQ ID NO: 4918 - RNA, 21 nt, Artificial Sequence
  SARM1 targeting guide sequence portion
cgggcacgcuggcgcucgugg

SEQ ID NO: 4919 - RNA, 21 nt, Artificial Sequence
  SARM1 targeting guide sequence portion
cgggcccgacgaccugcagcg

SEQ ID NO: 4920 - RNA, 21 nt, Artificial Sequence
  SARM1 targeting guide sequence portion
cgggcccgcggcccuggcuug

SEQ ID NO: 4921 - RNA, 21 nt, Artificial Sequence
  SARM1 targeting guide sequence portion
cgggcgaagcggccagggucc

SEQ ID NO: 4922 - RNA, 21 nt, Artificial Sequence
  SARM1 targeting guide sequence portion
cggggcuuucuaccucugcgc

SEQ ID NO: 4923 - RNA, 21 nt, Artificial Sequence
  SARM1 targeting guide sequence portion
cgggggccaggcggugcagcg

SEQ ID NO: 4924 - RNA, 21 nt, Artificial Sequence
  SARM1 targeting guide sequence portion
cgggguccgugcggcggcacc

SEQ ID NO: 4925 - RNA, 21 nt, Artificial Sequence
  SARM1 targeting guide sequence portion
cggguucgcguuccuucgcca

SEQ ID NO: 4926 - RNA, 21 nt, Artificial Sequence
  SARM1 targeting guide sequence portion
cggugcagcgacgcaugguag

SEQ ID NO: 4927 - RNA, 21 nt, Artificial Sequence
  SARM1 targeting guide sequence portion
cggugcuguauuggugccgcc

SEQ ID NO: 4928 - RNA, 21 nt, Artificial Sequence
  SARM1 targeting guide sequence portion
cgguguuggcgacuaacaagg

SEQ ID NO: 4929 - RNA, 21 nt, Artificial Sequence
  SARM1 targeting guide sequence portion
cgguuagagucgagcaacggc

SEQ ID NO: 4930 - RNA, 21 nt, Artificial Sequence
  SARM1 targeting guide sequence portion
cguagagcuggcgcggagcgu

SEQ ID NO: 4931 - RNA, 21 nt, Artificial Sequence
  SARM1 targeting guide sequence portion
cguccaccagacagcgggcga

SEQ ID NO: 4932 - RNA, 21 nt, Artificial Sequence
  SARM1 targeting guide sequence portion
cguccuccuuggagaaggcga

SEQ ID NO: 4933 - RNA, 21 nt, Artificial Sequence
  SARM1 targeting guide sequence portion
cgucgcugcaccgccuggccc

SEQ ID NO: 4934 - RNA, 21 nt, Artificial Sequence
  SARM1 targeting guide sequence portion
cgucgggcccgcggcccuggc

SEQ ID NO: 4935 - RNA, 21 nt, Artificial Sequence
  SARM1 targeting guide sequence portion
cgugauccugaaccuggcgaa

SEQ ID NO: 4936 - RNA, 21 nt, Artificial Sequence
  SARM1 targeting guide sequence portion
cgugcagccgaagcagcucgu

SEQ ID NO: 4937 - RNA, 21 nt, Artificial Sequence
  SARM1 targeting guide sequence portion
cgugcagcgcgcaguugccca

SEQ ID NO: 4938 - RNA, 21 nt, Artificial Sequence
  SARM1 targeting guide sequence portion
cgugcccgagcgcuccaccuc

SEQ ID NO: 4939 - RNA, 21 nt, Artificial Sequence
  SARM1 targeting guide sequence portion
cgugccguugcucgacucuaa

SEQ ID NO: 4940 - RNA, 21 nt, Artificial Sequence
  SARM1 targeting guide sequence portion
cgugcggcggcaccaauacag

SEQ ID NO: 4941 - RNA, 21 nt, Artificial Sequence
  SARM1 targeting guide sequence portion
cguggagccgcuuguggccuc

SEQ ID NO: 4942 - RNA, 21 nt, Artificial Sequence
  SARM1 targeting guide sequence portion
cguggcaggcaucuuggagca

SEQ ID NO: 4943 - RNA, 21 nt, Artificial Sequence
  SARM1 targeting guide sequence portion
cguggcgcgcauugggcuggg

SEQ ID NO: 4944 - RNA, 21 nt, Artificial Sequence
  SARM1 targeting guide sequence portion
cguuccuucgccagguucagg

SEQ ID NO: 4945 - RNA, 21 nt, Artificial Sequence
  SARM1 targeting guide sequence portion
cguugcucgacucuaaccgcu

SEQ ID NO: 4946 - RNA, 21 nt, Artificial Sequence
  SARM1 targeting guide sequence portion
cuaacaaggagguggagcgcg

SEQ ID NO: 4947 - RNA, 21 nt, Artificial Sequence
  SARM1 targeting guide sequence portion
cuaaccgcuuggaggcgcagu

SEQ ID NO: 4948 - RNA, 21 nt, Artificial Sequence
  SARM1 targeting guide sequence portion
cuaccaugcgucgcugcaccg

SEQ ID NO: 4949 - RNA, 21 nt, Artificial Sequence
  SARM1 targeting guide sequence portion
cuaccucugcgccgaggcugc

SEQ ID NO: 4950 - RNA, 21 nt, Artificial Sequence
  SARM1 targeting guide sequence portion
cuacggguucgcguuccuucg

SEQ ID NO: 4951 - RNA, 21 nt, Artificial Sequence
  SARM1 targeting guide sequence portion
cuacugcgaggcaggcgugca

SEQ ID NO: 4952 - RNA, 21 nt, Artificial Sequence
  SARM1 targeting guide sequence portion
cuccaagaugccugccacgcu

SEQ ID NO: 4953 - RNA, 21 nt, Artificial Sequence
  SARM1 targeting guide sequence portion
cuccaagcgguuagagucgag

SEQ ID NO: 4954 - RNA, 21 nt, Artificial Sequence
  SARM1 targeting guide sequence portion
cuccaaggaggacgagcugcu

SEQ ID NO: 4955 - RNA, 21 nt, Artificial Sequence
  SARM1 targeting guide sequence portion
cuccaccuccuuguuagucgc

SEQ ID NO: 4956 - RNA, 21 nt, Artificial Sequence
  SARM1 targeting guide sequence portion
cuccaccucgcgcuccaccuc

SEQ ID NO: 4957 - RNA, 21 nt, Artificial Sequence
  SARM1 targeting guide sequence portion
cuccacgagcgccagcgugcc

SEQ ID NO: 4958 - RNA, 21 nt, Artificial Sequence
  SARM1 targeting guide sequence portion
cuccgaaugcuugaacaugug

SEQ ID NO: 4959 - RNA, 21 nt, Artificial Sequence
  SARM1 targeting guide sequence portion
cuccgcgccagcucuacgggu

SEQ ID NO: 4960 - RNA, 21 nt, Artificial Sequence
  SARM1 targeting guide sequence portion
cuccuccgaaugcuugaacau

SEQ ID NO: 4961 - RNA, 21 nt, Artificial Sequence
  SARM1 targeting guide sequence portion
cuccuuggagaaggcgagcgg

SEQ ID NO: 4962 - RNA, 21 nt, Artificial Sequence
  SARM1 targeting guide sequence portion
cuccuuguuagucgccaacac

SEQ ID NO: 4963 - RNA, 21 nt, Artificial Sequence
  SARM1 targeting guide sequence portion
cucgacucuaaccgcuuggag

SEQ ID NO: 4964 - RNA, 21 nt, Artificial Sequence
  SARM1 targeting guide sequence portion
cucgcaguagcgguguuggcg

SEQ ID NO: 4965 - RNA, 21 nt, Artificial Sequence
  SARM1 targeting guide sequence portion
cucgccuucuccaaggaggac

SEQ ID NO: 4966 - RNA, 21 nt, Artificial Sequence
  SARM1 targeting guide sequence portion
cucgcgcuccaccuccuuguu

SEQ ID NO: 4967 - RNA, 21 nt, Artificial Sequence
  SARM1 targeting guide sequence portion
cucgcuggacccuggccgcuu

SEQ ID NO: 4968 - RNA, 21 nt, Artificial Sequence
  SARM1 targeting guide sequence portion
cucggcgcagagguagaaagc

SEQ ID NO: 4969 - RNA, 21 nt, Artificial Sequence
  SARM1 targeting guide sequence portion
cucggcugcgcgcuucucuac

SEQ ID NO: 4970 - RNA, 21 nt, Artificial Sequence
  SARM1 targeting guide sequence portion
cucgggcacgcuggcgcucgu

SEQ ID NO: 4971 - RNA, 21 nt, Artificial Sequence
  SARM1 targeting guide sequence portion
cucguccuccuuggagaaggc

SEQ ID NO: 4972 - RNA, 21 nt, Artificial Sequence
  SARM1 targeting guide sequence portion
cucgugccguugcucgacucu

SEQ ID NO: 4973 - RNA, 21 nt, Artificial Sequence
  SARM1 targeting guide sequence portion
cucguggagccgcuuguggcc

SEQ ID NO: 4974 - RNA, 21 nt, Artificial Sequence
  SARM1 targeting guide sequence portion
cucuaaccgcuuggaggcgca

SEQ ID NO: 4975 - RNA, 21 nt, Artificial Sequence
  SARM1 targeting guide sequence portion
cucuaccaugcgucgcugcac

SEQ ID NO: 4976 - RNA, 21 nt, Artificial Sequence
  SARM1 targeting guide sequence portion
cucuacggguucgcguuccuu

SEQ ID NO: 4977 - RNA, 21 nt, Artificial Sequence
  SARM1 targeting guide sequence portion
cucugcgccgaggcugccauc

SEQ ID NO: 4978 - RNA, 21 nt, Artificial Sequence
  SARM1 targeting guide sequence portion
cucuggcaugucuccuccgaa

SEQ ID NO: 4979 - RNA, 21 nt, Artificial Sequence
  SARM1 targeting guide sequence portion
cucuucccgcucgccuucucc

SEQ ID NO: 4980 - RNA, 21 nt, Artificial Sequence
  SARM1 targeting guide sequence portion
cucuugauggcagccucggcg

SEQ ID NO: 4981 - RNA, 21 nt, Artificial Sequence
  SARM1 targeting guide sequence portion
cugaaccuggcgaaggaacgc

SEQ ID NO: 4982 - RNA, 21 nt, Artificial Sequence
  SARM1 targeting guide sequence portion
cugcaccgccuggcccccgug

SEQ ID NO: 4983 - RNA, 21 nt, Artificial Sequence
  SARM1 targeting guide sequence portion
cugcacgccugccucgcagua

SEQ ID NO: 4984 - RNA, 21 nt, Artificial Sequence
  SARM1 targeting guide sequence portion
cugcacgggggccaggcggug

SEQ ID NO: 4985 - RNA, 21 nt, Artificial Sequence
  SARM1 targeting guide sequence portion
cugcagcgccucgugccguug

SEQ ID NO: 4986 - RNA, 21 nt, Artificial Sequence
  SARM1 targeting guide sequence portion
cugcaggucgucgggcccgcg

SEQ ID NO: 4987 - RNA, 21 nt, Artificial Sequence
  SARM1 targeting guide sequence portion
cugccacgcuccgcgccagcu

SEQ ID NO: 4988 - RNA, 21 nt, Artificial Sequence
  SARM1 targeting guide sequence portion
cugccaucaagagccugcaag

SEQ ID NO: 4989 - RNA, 21 nt, Artificial Sequence
  SARM1 targeting guide sequence portion
cugccucgcaguagcgguguu

SEQ ID NO: 4990 - RNA, 21 nt, Artificial Sequence
  SARM1 targeting guide sequence portion
cugcgaggcaggcgugcagcc

SEQ ID NO: 4991 - RNA, 21 nt, Artificial Sequence
  SARM1 targeting guide sequence portion
cugcgccacugcgcgcuggcg

SEQ ID NO: 4992 - RNA, 21 nt, Artificial Sequence
  SARM1 targeting guide sequence portion
cugcgccgaggcugccaucaa

SEQ ID NO: 4993 - RNA, 21 nt, Artificial Sequence
  SARM1 targeting guide sequence portion
cugcgccuccaagcgguuaga

SEQ ID NO: 4994 - RNA, 21 nt, Artificial Sequence
  SARM1 targeting guide sequence portion
cugcgcgcugcacgggggcca

SEQ ID NO: 4995 - RNA, 21 nt, Artificial Sequence
  SARM1 targeting guide sequence portion
cugcgcgcuggcgcugggcaa

SEQ ID NO: 4996 - RNA, 21 nt, Artificial Sequence
  SARM1 targeting guide sequence portion
cugcgcgcuucucuaccaugc

SEQ ID NO: 4997 - RNA, 21 nt, Artificial Sequence
  SARM1 targeting guide sequence portion
cugcugcgccacugcgcgcug

SEQ ID NO: 4998 - RNA, 21 nt, Artificial Sequence
  SARM1 targeting guide sequence portion
cugcuucggcugcacgccugc

SEQ ID NO: 4999 - RNA, 21 nt, Artificial Sequence
  SARM1 targeting guide sequence portion
cuggacccuggccgcuucgcc

SEQ ID NO: 5000 - RNA, 21 nt, Artificial Sequence
  SARM1 targeting guide sequence portion
cuggacgcggugcuguauugg

SEQ ID NO: 5001 - RNA, 21 nt, Artificial Sequence
  SARM1 targeting guide sequence portion
cuggcaugucuccuccgaaug

SEQ ID NO: 5002 - RNA, 21 nt, Artificial Sequence
  SARM1 targeting guide sequence portion
cuggcccccgugcagcgcgca

SEQ ID NO: 5003 - RNA, 21 nt, Artificial Sequence
  SARM1 targeting guide sequence portion
cuggccgcuucgcccgcuguc

SEQ ID NO: 5004 - RNA, 21 nt, Artificial Sequence
  SARM1 targeting guide sequence portion
cuggcgaaggaacgcgaaccc

SEQ ID NO: 5005 - RNA, 21 nt, Artificial Sequence
  SARM1 targeting guide sequence portion
cuggcgcggagcguggcaggc

SEQ ID NO: 5006 - RNA, 21 nt, Artificial Sequence
  SARM1 targeting guide sequence portion
cuggcgcucguggagccgcuu

SEQ ID NO: 5007 - RNA, 21 nt, Artificial Sequence
  SARM1 targeting guide sequence portion
cuggcgcugggcaacugcgcg

SEQ ID NO: 5008 - RNA, 21 nt, Artificial Sequence
  SARM1 targeting guide sequence portion
cuggcguccaccagacagcgg

SEQ ID NO: 5009 - RNA, 21 nt, Artificial Sequence
  SARM1 targeting guide sequence portion
cuggcuugugucgcuggcguc

SEQ ID NO: 5010 - RNA, 21 nt, Artificial Sequence
  SARM1 targeting guide sequence portion
cugggcaacugcgcgcugcac

SEQ ID NO: 5011 - RNA, 21 nt, Artificial Sequence
  SARM1 targeting guide sequence portion
cugggcgugauccugaaccug

SEQ ID NO: 5012 - RNA, 21 nt, Artificial Sequence
  SARM1 targeting guide sequence portion
cugguggacgccagcgacaca

SEQ ID NO: 5013 - RNA, 21 nt, Artificial Sequence
  SARM1 targeting guide sequence portion
cuguauuggugccgccgcacg

SEQ ID NO: 5014 - RNA, 21 nt, Artificial Sequence
  SARM1 targeting guide sequence portion
cugucugguggacgccagcga

SEQ ID NO: 5015 - RNA, 21 nt, Artificial Sequence
  SARM1 targeting guide sequence portion
cuucccgcucgccuucuccaa

SEQ ID NO: 5016 - RNA, 21 nt, Artificial Sequence
  SARM1 targeting guide sequence portion
cuucgccagguucaggaucac

SEQ ID NO: 5017 - RNA, 21 nt, Artificial Sequence
  SARM1 targeting guide sequence portion
cuucgcccgcugucuggugga

SEQ ID NO: 5018 - RNA, 21 nt, Artificial Sequence
  SARM1 targeting guide sequence portion
cuucggcugcacgccugccuc

SEQ ID NO: 5019 - RNA, 21 nt, Artificial Sequence
  SARM1 targeting guide sequence portion
cuucuccaaggaggacgagcu

SEQ ID NO: 5020 - RNA, 21 nt, Artificial Sequence
  SARM1 targeting guide sequence portion
cuucucuaccaugcgucgcug

SEQ ID NO: 5021 - RNA, 21 nt, Artificial Sequence
  SARM1 targeting guide sequence portion
cuugaacaugugcuccaagau

SEQ ID NO: 5022 - RNA, 21 nt, Artificial Sequence
  SARM1 targeting guide sequence portion
cuugauggcagccucggcgca

SEQ ID NO: 5023 - RNA, 21 nt, Artificial Sequence
  SARM1 targeting guide sequence portion
cuugcaggcucuugauggcag

SEQ ID NO: 5024 - RNA, 21 nt, Artificial Sequence
  SARM1 targeting guide sequence portion
cuugccuugcaggcucuugau

SEQ ID NO: 5025 - RNA, 21 nt, Artificial Sequence
  SARM1 targeting guide sequence portion
cuuggagaaggcgagcgggaa

SEQ ID NO: 5026 - RNA, 21 nt, Artificial Sequence
  SARM1 targeting guide sequence portion
cuuggagcacauguucaagca

SEQ ID NO: 5027 - RNA, 21 nt, Artificial Sequence
  SARM1 targeting guide sequence portion
cuuggaggcgcagugcaucgg

SEQ ID NO: 5028 - RNA, 21 nt, Artificial Sequence
  SARM1 targeting guide sequence portion
cuuggucuugccuugcaggcu

SEQ ID NO: 5029 - RNA, 21 nt, Artificial Sequence
  SARM1 targeting guide sequence portion
cuuguggccucgcuggacccu

SEQ ID NO: 5030 - RNA, 21 nt, Artificial Sequence
  SARM1 targeting guide sequence portion
cuugugucgcuggcguccacc

SEQ ID NO: 5031 - RNA, 21 nt, Artificial Sequence
  SARM1 targeting guide sequence portion
cuuguuagucgccaacaccgc

SEQ ID NO: 5032 - RNA, 21 nt, Artificial Sequence
  SARM1 targeting guide sequence portion
cuuucuaccucugcgccgagg

SEQ ID NO: 5033 - RNA, 21 nt, Artificial Sequence
  SARM1 targeting guide sequence portion
gaaagccccgaugcacugcgc

SEQ ID NO: 5034 - RNA, 21 nt, Artificial Sequence
  SARM1 targeting guide sequence portion
gaacaugugcuccaagaugcc

SEQ ID NO: 5035 - RNA, 21 nt, Artificial Sequence
  SARM1 targeting guide sequence portion
gaacccguagagcuggcgcgg

SEQ ID NO: 5036 - RNA, 21 nt, Artificial Sequence
  SARM1 targeting guide sequence portion
gaaccuggcgaaggaacgcga

SEQ ID NO: 5037 - RNA, 21 nt, Artificial Sequence
  SARM1 targeting guide sequence portion
gaacgcgaacccguagagcug

SEQ ID NO: 5038 - RNA, 21 nt, Artificial Sequence
  SARM1 targeting guide sequence portion
gaagagccacucggcugcgcg

SEQ ID NO: 5039 - RNA, 21 nt, Artificial Sequence
  SARM1 targeting guide sequence portion
gaagcagcucguccuccuugg

SEQ ID NO: 5040 - RNA, 21 nt, Artificial Sequence
  SARM1 targeting guide sequence portion
gaagcgcgcagccgaguggcu

SEQ ID NO: 5041 - RNA, 21 nt, Artificial Sequence
  SARM1 targeting guide sequence portion
gaagcggccaggguccagcga

SEQ ID NO: 5042 - RNA, 21 nt, Artificial Sequence
  SARM1 targeting guide sequence portion
gaaggaacgcgaacccguaga

SEQ ID NO: 5043 - RNA, 21 nt, Artificial Sequence
  SARM1 targeting guide sequence portion
gaaggcgagcgggaagagcca

SEQ ID NO: 5044 - RNA, 21 nt, Artificial Sequence
  SARM1 targeting guide sequence portion
gaaugcuugaacaugugcucc

SEQ ID NO: 5045 - RNA, 21 nt, Artificial Sequence
  SARM1 targeting guide sequence portion
gacacaagccagggccgcggg

SEQ ID NO: 5046 - RNA, 21 nt, Artificial Sequence
  SARM1 targeting guide sequence portion
gacagcgggcgaagcggccag

SEQ ID NO: 5047 - RNA, 21 nt, Artificial Sequence
  SARM1 targeting guide sequence portion
gacaugccagaggcugguggc

SEQ ID NO: 5048 - RNA, 21 nt, Artificial Sequence
  SARM1 targeting guide sequence portion
gaccccgcgcugcugcgccac

SEQ ID NO: 5049 - RNA, 21 nt, Artificial Sequence
  SARM1 targeting guide sequence portion
gacccuggccgcuucgcccgc

SEQ ID NO: 5050 - RNA, 21 nt, Artificial Sequence
  SARM1 targeting guide sequence portion
gaccgcguggcgcgcauuggg

SEQ ID NO: 5051 - RNA, 21 nt, Artificial Sequence
  SARM1 targeting guide sequence portion
gaccugcagcgccucgugccg

SEQ ID NO: 5052 - RNA, 21 nt, Artificial Sequence
  SARM1 targeting guide sequence portion
gacgaccugcagcgccucgug

SEQ ID NO: 5053 - RNA, 21 nt, Artificial Sequence
  SARM1 targeting guide sequence portion
gacgagcugcuucggcugcac

SEQ ID NO: 5054 - RNA, 21 nt, Artificial Sequence
  SARM1 targeting guide sequence portion
gacgcaugguagagaagcgcg

SEQ ID NO: 5055 - RNA, 21 nt, Artificial Sequence
  SARM1 targeting guide sequence portion
gacgccagcgacacaagccag

SEQ ID NO: 5056 - RNA, 21 nt, Artificial Sequence
  SARM1 targeting guide sequence portion
gacgcggugcuguauuggugc

SEQ ID NO: 5057 - RNA, 21 nt, Artificial Sequence
  SARM1 targeting guide sequence portion
gacuaacaaggagguggagcg

SEQ ID NO: 5058 - RNA, 21 nt, Artificial Sequence
  SARM1 targeting guide sequence portion
gacucuaaccgcuuggaggcg

SEQ ID NO: 5059 - RNA, 21 nt, Artificial Sequence
  SARM1 targeting guide sequence portion
gagaagcgcgcagccgagugg

SEQ ID NO: 5060 - RNA, 21 nt, Artificial Sequence
  SARM1 targeting guide sequence portion
gagaaggcgagcgggaagagc

SEQ ID NO: 5061 - RNA, 21 nt, Artificial Sequence
  SARM1 targeting guide sequence portion
gagacaugccagaggcuggug

SEQ ID NO: 5062 - RNA, 21 nt, Artificial Sequence
  SARM1 targeting guide sequence portion
gagaccgcguggcgcgcauug

SEQ ID NO: 5063 - RNA, 21 nt, Artificial Sequence
  SARM1 targeting guide sequence portion
gagcaacggcacgaggcgcug

SEQ ID NO: 5064 - RNA, 21 nt, Artificial Sequence
  SARM1 targeting guide sequence portion
gagcacauguucaagcauucg

SEQ ID NO: 5065 - RNA, 21 nt, Artificial Sequence
  SARM1 targeting guide sequence portion
gagccacucggcugcgcgcuu

SEQ ID NO: 5066 - RNA, 21 nt, Artificial Sequence
  SARM1 targeting guide sequence portion
gagccgcuuguggccucgcug

SEQ ID NO: 5067 - RNA, 21 nt, Artificial Sequence
  SARM1 targeting guide sequence portion
gagccugcaaggcaagaccaa

SEQ ID NO: 5068 - RNA, 21 nt, Artificial Sequence
  SARM1 targeting guide sequence portion
gagcgccagcgugcccgagcg

SEQ ID NO: 5069 - RNA, 21 nt, Artificial Sequence
  SARM1 targeting guide sequence portion
gagcgcgagguggagcgcucg

SEQ ID NO: 5070 - RNA, 21 nt, Artificial Sequence
  SARM1 targeting guide sequence portion
gagcgcuccaccucgcgcucc

SEQ ID NO: 5071 - RNA, 21 nt, Artificial Sequence
  SARM1 targeting guide sequence portion
gagcgcucgggcacgcuggcg

SEQ ID NO: 5072 - RNA, 21 nt, Artificial Sequence
  SARM1 targeting guide sequence portion
gagcgggaagagccacucggc

SEQ ID NO: 5073 - RNA, 21 nt, Artificial Sequence
  SARM1 targeting guide sequence portion
gagcguggcaggcaucuugga

SEQ ID NO: 5074 - RNA, 21 nt, Artificial Sequence
  SARM1 targeting guide sequence portion
gagcugcuucggcugcacgcc

SEQ ID NO: 5075 - RNA, 21 nt, Artificial Sequence
  SARM1 targeting guide sequence portion
gagcuggcgcggagcguggca

SEQ ID NO: 5076 - RNA, 21 nt, Artificial Sequence
  SARM1 targeting guide sequence portion
gaggacgagcugcuucggcug

SEQ ID NO: 5077 - RNA, 21 nt, Artificial Sequence
  SARM1 targeting guide sequence portion
gaggagacaugccagaggcug

SEQ ID NO: 5078 - RNA, 21 nt, Artificial Sequence
  SARM1 targeting guide sequence portion
gaggcaggcgugcagccgaag

SEQ ID NO: 5079 - RNA, 21 nt, Artificial Sequence
  SARM1 targeting guide sequence portion
gaggccacaagcggcuccacg

SEQ ID NO: 5080 - RNA, 21 nt, Artificial Sequence
  SARM1 targeting guide sequence portion
gaggcgcagugcaucggggcu

SEQ ID NO: 5081 - RNA, 21 nt, Artificial Sequence
  SARM1 targeting guide sequence portion
gaggcgcugcaggucgucggg

SEQ ID NO: 5082 - RNA, 21 nt, Artificial Sequence
  SARM1 targeting guide sequence portion
gaggcugccaucaagagccug

SEQ ID NO: 5083 - RNA, 21 nt, Artificial Sequence
  SARM1 targeting guide sequence portion
gaggcugguggcggccggcgg

SEQ ID NO: 5084 - RNA, 21 nt, Artificial Sequence
  SARM1 targeting guide sequence portion
gagguagaaagccccgaugca

SEQ ID NO: 5085 - RNA, 21 nt, Artificial Sequence
  SARM1 targeting guide sequence portion
gagguggagcgcgagguggag

SEQ ID NO: 5086 - RNA, 21 nt, Artificial Sequence
  SARM1 targeting guide sequence portion
gagguggagcgcucgggcacg

SEQ ID NO: 5087 - RNA, 21 nt, Artificial Sequence
  SARM1 targeting guide sequence portion
gagucgagcaacggcacgagg

SEQ ID NO: 5088 - RNA, 21 nt, Artificial Sequence
  SARM1 targeting guide sequence portion
gaguggcucuucccgcucgcc

SEQ ID NO: 5089 - RNA, 21 nt, Artificial Sequence
  SARM1 targeting guide sequence portion
gaucacgcccagcccaaugcg

SEQ ID NO: 5090 - RNA, 21 nt, Artificial Sequence
  SARM1 targeting guide sequence portion
gauccugaaccuggcgaagga

SEQ ID NO: 5091 - RNA, 21 nt, Artificial Sequence
  SARM1 targeting guide sequence portion
gaugcacugcgccuccaagcg

SEQ ID NO: 5092 - RNA, 21 nt, Artificial Sequence
  SARM1 targeting guide sequence portion
gaugccugccacgcuccgcgc

SEQ ID NO: 5093 - RNA, 21 nt, Artificial Sequence
  SARM1 targeting guide sequence portion
gauggcagccucggcgcagag

SEQ ID NO: 5094 - RNA, 21 nt, Artificial Sequence
  SARM1 targeting guide sequence portion
gcaacggcacgaggcgcugca

SEQ ID NO: 5095 - RNA, 21 nt, Artificial Sequence
  SARM1 targeting guide sequence portion
gcaacugcgcgcugcacgggg

SEQ ID NO: 5096 - RNA, 21 nt, Artificial Sequence
  SARM1 targeting guide sequence portion
gcacauguucaagcauucgga

SEQ ID NO: 5097 - RNA, 21 nt, Artificial Sequence
  SARM1 targeting guide sequence portion
gcaccaauacagcaccgcguc

SEQ ID NO: 5098 - RNA, 21 nt, Artificial Sequence
  SARM1 targeting guide sequence portion
gcacgaggcgcugcaggucgu

SEQ ID NO: 5099 - RNA, 21 nt, Artificial Sequence
  SARM1 targeting guide sequence portion
gcacgccugccucgcaguagc

SEQ ID NO: 5100 - RNA, 21 nt, Artificial Sequence
  SARM1 targeting guide sequence portion
gcacgcuggcgcucguggagc

SEQ ID NO: 5101 - RNA, 21 nt, Artificial Sequence
  SARM1 targeting guide sequence portion
gcacggaccccgcgcugcugc

SEQ ID NO: 5102 - RNA, 21 nt, Artificial Sequence
  SARM1 targeting guide sequence portion
gcacgggggccaggcggugca

SEQ ID NO: 5103 - RNA, 21 nt, Artificial Sequence
  SARM1 targeting guide sequence portion
gcacugcgccuccaagcgguu

SEQ ID NO: 5104 - RNA, 21 nt, Artificial Sequence
  SARM1 targeting guide sequence portion
gcagagaccgcguggcgcgca

SEQ ID NO: 5105 - RNA, 21 nt, Artificial Sequence
  SARM1 targeting guide sequence portion
gcagagguagaaagccccgau

SEQ ID NO: 5106 - RNA, 21 nt, Artificial Sequence
  SARM1 targeting guide sequence portion
gcagccgaagcagcucguccu

SEQ ID NO: 5107 - RNA, 21 nt, Artificial Sequence
  SARM1 targeting guide sequence portion
gcagccgaguggcucuucccg

SEQ ID NO: 5108 - RNA, 21 nt, Artificial Sequence
  SARM1 targeting guide sequence portion
gcagccucggcgcagagguag

SEQ ID NO: 5109 - RNA, 21 nt, Artificial Sequence
  SARM1 targeting guide sequence portion
gcagcgacgcaugguagagaa

SEQ ID NO: 5110 - RNA, 21 nt, Artificial Sequence
  SARM1 targeting guide sequence portion
gcagcgccucgugccguugcu

SEQ ID NO: 5111 - RNA, 21 nt, Artificial Sequence
  SARM1 targeting guide sequence portion
gcagcgcgcaguugcccagcg

SEQ ID NO: 5112 - RNA, 21 nt, Artificial Sequence
  SARM1 targeting guide sequence portion
gcagcucguccuccuuggaga

SEQ ID NO: 5113 - RNA, 21 nt, Artificial Sequence
  SARM1 targeting guide sequence portion
gcaggcaucuuggagcacaug

SEQ ID NO: 5114 - RNA, 21 nt, Artificial Sequence
  SARM1 targeting guide sequence portion
gcaggcgugcagccgaagcag

SEQ ID NO: 5115 - RNA, 21 nt, Artificial Sequence
  SARM1 targeting guide sequence portion
gcaggcucuugauggcagccu

SEQ ID NO: 5116 - RNA, 21 nt, Artificial Sequence
  SARM1 targeting guide sequence portion
gcaguagcgguguuggcgacu

SEQ ID NO: 5117 - RNA, 21 nt, Artificial Sequence
  SARM1 targeting guide sequence portion
gcagugcaucggggcuuucua

SEQ ID NO: 5118 - RNA, 21 nt, Artificial Sequence
  SARM1 targeting guide sequence portion
gcaguggcgcagcagcgcggg

SEQ ID NO: 5119 - RNA, 21 nt, Artificial Sequence
  SARM1 targeting guide sequence portion
gcaguugcccagcgccagcgc

SEQ ID NO: 5120 - RNA, 21 nt, Artificial Sequence
  SARM1 targeting guide sequence portion
gcaucggggcuuucuaccucu

SEQ ID NO: 5121 - RNA, 21 nt, Artificial Sequence
  SARM1 targeting guide sequence portion
gcaucuuggagcacauguuca

SEQ ID NO: 5122 - RNA, 21 nt, Artificial Sequence
  SARM1 targeting guide sequence portion
gcaugguagagaagcgcgcag

SEQ ID NO: 5123 - RNA, 21 nt, Artificial Sequence
  SARM1 targeting guide sequence portion
gcaugucuccuccgaaugcuu

SEQ ID NO: 5124 - RNA, 21 nt, Artificial Sequence
  SARM1 targeting guide sequence portion
gcauucggaggagacaugcca

SEQ ID NO: 5125 - RNA, 21 nt, Artificial Sequence
  SARM1 targeting guide sequence portion
gcauugggcugggcgugaucc

SEQ ID NO: 5126 - RNA, 21 nt, Artificial Sequence
  SARM1 targeting guide sequence portion
gccaacaccgcuacugcgagg

SEQ ID NO: 5127 - RNA, 21 nt, Artificial Sequence
  SARM1 targeting guide sequence portion
gccacaagcggcuccacgagc

SEQ ID NO: 5128 - RNA, 21 nt, Artificial Sequence
  SARM1 targeting guide sequence portion
gccaccagccucuggcauguc

SEQ ID NO: 5129 - RNA, 21 nt, Artificial Sequence
  SARM1 targeting guide sequence portion
gccacgcuccgcgccagcucu

SEQ ID NO: 5130 - RNA, 21 nt, Artificial Sequence
  SARM1 targeting guide sequence portion
gccacucggcugcgcgcuucu

SEQ ID NO: 5131 - RNA, 21 nt, Artificial Sequence
  SARM1 targeting guide sequence portion
gccacugcgcgcuggcgcugg

SEQ ID NO: 5132 - RNA, 21 nt, Artificial Sequence
  SARM1 targeting guide sequence portion
gccagcgacacaagccagggc

SEQ ID NO: 5133 - RNA, 21 nt, Artificial Sequence
  SARM1 targeting guide sequence portion
gccagcgcgcaguggcgcagc

SEQ ID NO: 5134 - RNA, 21 nt, Artificial Sequence
  SARM1 targeting guide sequence portion
gccagcgugcccgagcgcucc

SEQ ID NO: 5135 - RNA, 21 nt, Artificial Sequence
  SARM1 targeting guide sequence portion
gccagcucuacggguucgcgu

SEQ ID NO: 5136 - RNA, 21 nt, Artificial Sequence
  SARM1 targeting guide sequence portion
gccaggcggugcagcgacgca

SEQ ID NO: 5137 - RNA, 21 nt, Artificial Sequence
  SARM1 targeting guide sequence portion
gccaggguccagcgaggccac

SEQ ID NO: 5138 - RNA, 21 nt, Artificial Sequence
  SARM1 targeting guide sequence portion
gccagguucaggaucacgccc

SEQ ID NO: 5139 - RNA, 21 nt, Artificial Sequence
  SARM1 targeting guide sequence portion
gccaucaagagccugcaaggc

SEQ ID NO: 5140 - RNA, 21 nt, Artificial Sequence
  SARM1 targeting guide sequence portion
gcccaaugcgcgccacgcggu

SEQ ID NO: 5141 - RNA, 21 nt, Artificial Sequence
  SARM1 targeting guide sequence portion
gcccagcccaaugcgcgccac

SEQ ID NO: 5142 - RNA, 21 nt, Artificial Sequence
  SARM1 targeting guide sequence portion
gcccagcgccagcgcgcagug

SEQ ID NO: 5143 - RNA, 21 nt, Artificial Sequence
  SARM1 targeting guide sequence portion
gcccccgugcagcgcgcaguu

SEQ ID NO: 5144 - RNA, 21 nt, Artificial Sequence
  SARM1 targeting guide sequence portion
gccccgaugcacugcgccucc

SEQ ID NO: 5145 - RNA, 21 nt, Artificial Sequence
  SARM1 targeting guide sequence portion
gcccgacgaccugcagcgccu

SEQ ID NO: 5146 - RNA, 21 nt, Artificial Sequence
  SARM1 targeting guide sequence portion
gcccgagcgcuccaccucgcg

SEQ ID NO: 5147 - RNA, 21 nt, Artificial Sequence
  SARM1 targeting guide sequence portion
gcccgcggcccuggcuugugu

SEQ ID NO: 5148 - RNA, 21 nt, Artificial Sequence
  SARM1 targeting guide sequence portion
gcccgcugucugguggacgcc

SEQ ID NO: 5149 - RNA, 21 nt, Artificial Sequence
  SARM1 targeting guide sequence portion
gcccuggcuugugucgcuggc

SEQ ID NO: 5150 - RNA, 21 nt, Artificial Sequence
  SARM1 targeting guide sequence portion
gccgaagcagcucguccuccu

SEQ ID NO: 5151 - RNA, 21 nt, Artificial Sequence
  SARM1 targeting guide sequence portion
gccgaggcugccaucaagagc

SEQ ID NO: 5152 - RNA, 21 nt, Artificial Sequence
  SARM1 targeting guide sequence portion
gccgaguggcucuucccgcuc

SEQ ID NO: 5153 - RNA, 21 nt, Artificial Sequence
  SARM1 targeting guide sequence portion
gccgccaccagccucuggcau

SEQ ID NO: 5154 - RNA, 21 nt, Artificial Sequence
  SARM1 targeting guide sequence portion
gccgccggccgccaccagccu

SEQ ID NO: 5155 - RNA, 21 nt, Artificial Sequence
  SARM1 targeting guide sequence portion
gccgcuucgcccgcugucugg

SEQ ID NO: 5156 - RNA, 21 nt, Artificial Sequence
  SARM1 targeting guide sequence portion
gccgcuuguggccucgcugga

SEQ ID NO: 5157 - RNA, 21 nt, Artificial Sequence
  SARM1 targeting guide sequence portion
gccggccgccaccagccucug

SEQ ID NO: 5158 - RNA, 21 nt, Artificial Sequence
  SARM1 targeting guide sequence portion
gccggcggccuggacgcggug

SEQ ID NO: 5159 - RNA, 21 nt, Artificial Sequence
  SARM1 targeting guide sequence portion
gccguugcucgacucuaaccg

SEQ ID NO: 5160 - RNA, 21 nt, Artificial Sequence
  SARM1 targeting guide sequence portion
gccuccaagcgguuagagucg

SEQ ID NO: 5161 - RNA, 21 nt, Artificial Sequence
  SARM1 targeting guide sequence portion
gccucgcaguagcgguguugg

SEQ ID NO: 5162 - RNA, 21 nt, Artificial Sequence
  SARM1 targeting guide sequence portion
gccucgcuggacccuggccgc

SEQ ID NO: 5163 - RNA, 21 nt, Artificial Sequence
  SARM1 targeting guide sequence portion
gccucggcgcagagguagaaa

SEQ ID NO: 5164 - RNA, 21 nt, Artificial Sequence
  SARM1 targeting guide sequence portion
gccucgugccguugcucgacu

SEQ ID NO: 5165 - RNA, 21 nt, Artificial Sequence
  SARM1 targeting guide sequence portion
gccucuggcaugucuccuccg

SEQ ID NO: 5166 - RNA, 21 nt, Artificial Sequence
  SARM1 targeting guide sequence portion
gccugcaaggcaagaccaagg

SEQ ID NO: 5167 - RNA, 21 nt, Artificial Sequence
  SARM1 targeting guide sequence portion
gccugccacgcuccgcgccag

SEQ ID NO: 5168 - RNA, 21 nt, Artificial Sequence
  SARM1 targeting guide sequence portion
gccugccucgcaguagcggug

SEQ ID NO: 5169 - RNA, 21 nt, Artificial Sequence
  SARM1 targeting guide sequence portion
gccuggacgcggugcuguauu

SEQ ID NO: 5170 - RNA, 21 nt, Artificial Sequence
  SARM1 targeting guide sequence portion
gccuggcccccgugcagcgcg

SEQ ID NO: 5171 - RNA, 21 nt, Artificial Sequence
  SARM1 targeting guide sequence portion
gccuucuccaaggaggacgag

SEQ ID NO: 5172 - RNA, 21 nt, Artificial Sequence
  SARM1 targeting guide sequence portion
gccuugcaggcucuugauggc

SEQ ID NO: 5173 - RNA, 21 nt, Artificial Sequence
  SARM1 targeting guide sequence portion
gcgaacccguagagcuggcgc

SEQ ID NO: 5174 - RNA, 21 nt, Artificial Sequence
  SARM1 targeting guide sequence portion
gcgaagcggccaggguccagc

SEQ ID NO: 5175 - RNA, 21 nt, Artificial Sequence
  SARM1 targeting guide sequence portion
gcgaaggaacgcgaacccgua

SEQ ID NO: 5176 - RNA, 21 nt, Artificial Sequence
  SARM1 targeting guide sequence portion
gcgacacaagccagggccgcg

SEQ ID NO: 5177 - RNA, 21 nt, Artificial Sequence
  SARM1 targeting guide sequence portion
gcgacgcaugguagagaagcg

SEQ ID NO: 5178 - RNA, 21 nt, Artificial Sequence
  SARM1 targeting guide sequence portion
gcgacuaacaaggagguggag

SEQ ID NO: 5179 - RNA, 21 nt, Artificial Sequence
  SARM1 targeting guide sequence portion
gcgagcgggaagagccacucg

SEQ ID NO: 5180 - RNA, 21 nt, Artificial Sequence
  SARM1 targeting guide sequence portion
gcgaggcaggcgugcagccga

SEQ ID NO: 5181 - RNA, 21 nt, Artificial Sequence
  SARM1 targeting guide sequence portion
gcgaggccacaagcggcucca

SEQ ID NO: 5182 - RNA, 21 nt, Artificial Sequence
  SARM1 targeting guide sequence portion
gcgagguggagcgcucgggca

SEQ ID NO: 5183 - RNA, 21 nt, Artificial Sequence
  SARM1 targeting guide sequence portion
gcgcagagguagaaagccccg

SEQ ID NO: 5184 - RNA, 21 nt, Artificial Sequence
  SARM1 targeting guide sequence portion
gcgcagccgaguggcucuucc

SEQ ID NO: 5185 - RNA, 21 nt, Artificial Sequence
  SARM1 targeting guide sequence portion
gcgcagugcaucggggcuuuc

SEQ ID NO: 5186 - RNA, 21 nt, Artificial Sequence
  SARM1 targeting guide sequence portion
gcgcaguggcgcagcagcgcg

SEQ ID NO: 5187 - RNA, 21 nt, Artificial Sequence
  SARM1 targeting guide sequence portion
gcgcaguugcccagcgccagc

SEQ ID NO: 5188 - RNA, 21 nt, Artificial Sequence
  SARM1 targeting guide sequence portion
gcgcauugggcugggcgugau

SEQ ID NO: 5189 - RNA, 21 nt, Artificial Sequence
  SARM1 targeting guide sequence portion
gcgccacugcgcgcuggcgcu

SEQ ID NO: 5190 - RNA, 21 nt, Artificial Sequence
  SARM1 targeting guide sequence portion
gcgccagcgcgcaguggcgca

SEQ ID NO: 5191 - RNA, 21 nt, Artificial Sequence
  SARM1 targeting guide sequence portion
gcgccagcgugcccgagcgcu

SEQ ID NO: 5192 - RNA, 21 nt, Artificial Sequence
  SARM1 targeting guide sequence portion
gcgccagcucuacggguucgc

SEQ ID NO: 5193 - RNA, 21 nt, Artificial Sequence
  SARM1 targeting guide sequence portion
gcgccgaggcugccaucaaga

SEQ ID NO: 5194 - RNA, 21 nt, Artificial Sequence
  SARM1 targeting guide sequence portion
gcgccuccaagcgguuagagu

SEQ ID NO: 5195 - RNA, 21 nt, Artificial Sequence
  SARM1 targeting guide sequence portion
gcgccucgugccguugcucga

SEQ ID NO: 5196 - RNA, 21 nt, Artificial Sequence
  SARM1 targeting guide sequence portion
gcgcgagguggagcgcucggg

SEQ ID NO: 5197 - RNA, 21 nt, Artificial Sequence
  SARM1 targeting guide sequence portion
gcgcgcagccgaguggcucuu

SEQ ID NO: 5198 - RNA, 21 nt, Artificial Sequence
  SARM1 targeting guide sequence portion
gcgcgcaguggcgcagcagcg

SEQ ID NO: 5199 - RNA, 21 nt, Artificial Sequence
  SARM1 targeting guide sequence portion
gcgcgcaguugcccagcgcca

SEQ ID NO: 5200 - RNA, 21 nt, Artificial Sequence
  SARM1 targeting guide sequence portion
gcgcgcauugggcugggcgug

SEQ ID NO: 5201 - RNA, 21 nt, Artificial Sequence
  SARM1 targeting guide sequence portion
gcgcgcuggcgcugggcaacu

SEQ ID NO: 5202 - RNA, 21 nt, Artificial Sequence
  SARM1 targeting guide sequence portion
gcgcgcuucucuaccaugcgu

SEQ ID NO: 5203 - RNA, 21 nt, Artificial Sequence
  SARM1 targeting guide sequence portion
gcgcggagcguggcaggcauc

SEQ ID NO: 5204 - RNA, 21 nt, Artificial Sequence
  SARM1 targeting guide sequence portion
gcgcgggguccgugcggcggc

SEQ ID NO: 5205 - RNA, 21 nt, Artificial Sequence
  SARM1 targeting guide sequence portion
gcgcuccaccuccuuguuagu

SEQ ID NO: 5206 - RNA, 21 nt, Artificial Sequence
  SARM1 targeting guide sequence portion
gcgcuccaccucgcgcuccac

SEQ ID NO: 5207 - RNA, 21 nt, Artificial Sequence
  SARM1 targeting guide sequence portion
gcgcucgggcacgcuggcgcu

SEQ ID NO: 5208 - RNA, 21 nt, Artificial Sequence
  SARM1 targeting guide sequence portion
gcgcucguggagccgcuugug

SEQ ID NO: 5209 - RNA, 21 nt, Artificial Sequence
  SARM1 targeting guide sequence portion
gcgcugcacgggggccaggcg

SEQ ID NO: 5210 - RNA, 21 nt, Artificial Sequence
  SARM1 targeting guide sequence portion
gcgcugcugcgccacugcgcg

SEQ ID NO: 5211 - RNA, 21 nt, Artificial Sequence
  SARM1 targeting guide sequence portion
gcgcuggcgcugggcaacugc

SEQ ID NO: 5212 - RNA, 21 nt, Artificial Sequence
  SARM1 targeting guide sequence portion
gcgcugggcaacugcgcgcug

SEQ ID NO: 5213 - RNA, 21 nt, Artificial Sequence
  SARM1 targeting guide sequence portion
gcgcuucucuaccaugcgucg

SEQ ID NO: 5214 - RNA, 21 nt, Artificial Sequence
  SARM1 targeting guide sequence portion
gcggagcguggcaggcaucuu

SEQ ID NO: 5215 - RNA, 21 nt, Artificial Sequence
  SARM1 targeting guide sequence portion
gcggcaccaauacagcaccgc

SEQ ID NO: 5216 - RNA, 21 nt, Artificial Sequence
  SARM1 targeting guide sequence portion
gcggccaggguccagcgaggc

SEQ ID NO: 5217 - RNA, 21 nt, Artificial Sequence
  SARM1 targeting guide sequence portion
gcggcccuggcuugugucgcu

SEQ ID NO: 5218 - RNA, 21 nt, Artificial Sequence
  SARM1 targeting guide sequence portion
gcggccuggacgcggugcugu

SEQ ID NO: 5219 - RNA, 21 nt, Artificial Sequence
  SARM1 targeting guide sequence portion
gcggcggcaccaauacagcac

SEQ ID NO: 5220 - RNA, 21 nt, Artificial Sequence
  SARM1 targeting guide sequence portion
gcggcuccacgagcgccagcg

SEQ ID NO: 5221 - RNA, 21 nt, Artificial Sequence
  SARM1 targeting guide sequence portion
gcgggaagagccacucggcug

SEQ ID NO: 5222 - RNA, 21 nt, Artificial Sequence
  SARM1 targeting guide sequence portion
gcgggcccgacgaccugcagc

SEQ ID NO: 5223 - RNA, 21 nt, Artificial Sequence
  SARM1 targeting guide sequence portion
gcgggcgaagcggccaggguc

SEQ ID NO: 5224 - RNA, 21 nt, Artificial Sequence
  SARM1 targeting guide sequence portion
gcgggguccgugcggcggcac

SEQ ID NO: 5225 - RNA, 21 nt, Artificial Sequence
  SARM1 targeting guide sequence portion
gcggugcagcgacgcauggua

SEQ ID NO: 5226 - RNA, 21 nt, Artificial Sequence
  SARM1 targeting guide sequence portion
gcggugcuguauuggugccgc

SEQ ID NO: 5227 - RNA, 21 nt, Artificial Sequence
  SARM1 targeting guide sequence portion
gcgguguuggcgacuaacaag

SEQ ID NO: 5228 - RNA, 21 nt, Artificial Sequence
  SARM1 targeting guide sequence portion
gcgguuagagucgagcaacgg

SEQ ID NO: 5229 - RNA, 21 nt, Artificial Sequence
  SARM1 targeting guide sequence portion
gcguccaccagacagcgggcg

SEQ ID NO: 5230 - RNA, 21 nt, Artificial Sequence
  SARM1 targeting guide sequence portion
gcgucgcugcaccgccuggcc

SEQ ID NO: 5231 - RNA, 21 nt, Artificial Sequence
  SARM1 targeting guide sequence portion
gcgugauccugaaccuggcga

SEQ ID NO: 5232 - RNA, 21 nt, Artificial Sequence
  SARM1 targeting guide sequence portion
gcgugcagccgaagcagcucg

SEQ ID NO: 5233 - RNA, 21 nt, Artificial Sequence
  SARM1 targeting guide sequence portion
gcgugcccgagcgcuccaccu

SEQ ID NO: 5234 - RNA, 21 nt, Artificial Sequence
  SARM1 targeting guide sequence portion
gcguggcaggcaucuuggagc

SEQ ID NO: 5235 - RNA, 21 nt, Artificial Sequence
  SARM1 targeting guide sequence portion
gcguggcgcgcauugggcugg

SEQ ID NO: 5236 - RNA, 21 nt, Artificial Sequence
  SARM1 targeting guide sequence portion
gcguuccuucgccagguucag

SEQ ID NO: 5237 - RNA, 21 nt, Artificial Sequence
  SARM1 targeting guide sequence portion
gcuacugcgaggcaggcgugc

SEQ ID NO: 5238 - RNA, 21 nt, Artificial Sequence
  SARM1 targeting guide sequence portion
gcuccaagaugccugccacgc

SEQ ID NO: 5239 - RNA, 21 nt, Artificial Sequence
  SARM1 targeting guide sequence portion
gcuccaccuccuuguuagucg

SEQ ID NO: 5240 - RNA, 21 nt, Artificial Sequence
  SARM1 targeting guide sequence portion
gcuccaccucgcgcuccaccu

SEQ ID NO: 5241 - RNA, 21 nt, Artificial Sequence
  SARM1 targeting guide sequence portion
gcuccacgagcgccagcgugc

SEQ ID NO: 5242 - RNA, 21 nt, Artificial Sequence
  SARM1 targeting guide sequence portion
gcuccgcgccagcucuacggg

SEQ ID NO: 5243 - RNA, 21 nt, Artificial Sequence
  SARM1 targeting guide sequence portion
gcucgacucuaaccgcuugga

SEQ ID NO: 5244 - RNA, 21 nt, Artificial Sequence
  SARM1 targeting guide sequence portion
gcucgccuucuccaaggagga

SEQ ID NO: 5245 - RNA, 21 nt, Artificial Sequence
  SARM1 targeting guide sequence portion
gcucgggcacgcuggcgcucg

SEQ ID NO: 5246 - RNA, 21 nt, Artificial Sequence
  SARM1 targeting guide sequence portion
gcucguccuccuuggagaagg

SEQ ID NO: 5247 - RNA, 21 nt, Artificial Sequence
  SARM1 targeting guide sequence portion
gcucguggagccgcuuguggc

SEQ ID NO: 5248 - RNA, 21 nt, Artificial Sequence
  SARM1 targeting guide sequence portion
gcucuacggguucgcguuccu

SEQ ID NO: 5249 - RNA, 21 nt, Artificial Sequence
  SARM1 targeting guide sequence portion
gcucuucccgcucgccuucuc

SEQ ID NO: 5250 - RNA, 21 nt, Artificial Sequence
  SARM1 targeting guide sequence portion
gcucuugauggcagccucggc

SEQ ID NO: 5251 - RNA, 21 nt, Artificial Sequence
  SARM1 targeting guide sequence portion
gcugcaccgccuggcccccgu

SEQ ID NO: 5252 - RNA, 21 nt, Artificial Sequence
  SARM1 targeting guide sequence portion
gcugcacgccugccucgcagu

SEQ ID NO: 5253 - RNA, 21 nt, Artificial Sequence
  SARM1 targeting guide sequence portion
gcugcacgggggccaggcggu

SEQ ID NO: 5254 - RNA, 21 nt, Artificial Sequence
  SARM1 targeting guide sequence portion
gcugcaggucgucgggcccgc

SEQ ID NO: 5255 - RNA, 21 nt, Artificial Sequence
  SARM1 targeting guide sequence portion
gcugccaucaagagccugcaa

SEQ ID NO: 5256 - RNA, 21 nt, Artificial Sequence
  SARM1 targeting guide sequence portion
gcugcgccacugcgcgcuggc

SEQ ID NO: 5257 - RNA, 21 nt, Artificial Sequence
  SARM1 targeting guide sequence portion
gcugcgcgcuucucuaccaug

SEQ ID NO: 5258 - RNA, 21 nt, Artificial Sequence
  SARM1 targeting guide sequence portion
gcugcugcgccacugcgcgcu

SEQ ID NO: 5259 - RNA, 21 nt, Artificial Sequence
  SARM1 targeting guide sequence portion
gcugcuucggcugcacgccug

SEQ ID NO: 5260 - RNA, 21 nt, Artificial Sequence
  SARM1 targeting guide sequence portion
gcuggacccuggccgcuucgc

SEQ ID NO: 5261 - RNA, 21 nt, Artificial Sequence
  SARM1 targeting guide sequence portion
gcuggcgcggagcguggcagg

SEQ ID NO: 5262 - RNA, 21 nt, Artificial Sequence
  SARM1 targeting guide sequence portion
gcuggcgcucguggagccgcu

SEQ ID NO: 5263 - RNA, 21 nt, Artificial Sequence
  SARM1 targeting guide sequence portion
gcuggcgcugggcaacugcgc

SEQ ID NO: 5264 - RNA, 21 nt, Artificial Sequence
  SARM1 targeting guide sequence portion
gcuggcguccaccagacagcg

SEQ ID NO: 5265 - RNA, 21 nt, Artificial Sequence
  SARM1 targeting guide sequence portion
gcugggcaacugcgcgcugca

SEQ ID NO: 5266 - RNA, 21 nt, Artificial Sequence
  SARM1 targeting guide sequence portion
gcugggcgugauccugaaccu

SEQ ID NO: 5267 - RNA, 21 nt, Artificial Sequence
  SARM1 targeting guide sequence portion
gcuguauuggugccgccgcac

SEQ ID NO: 5268 - RNA, 21 nt, Artificial Sequence
  SARM1 targeting guide sequence portion
gcugucugguggacgccagcg

SEQ ID NO: 5269 - RNA, 21 nt, Artificial Sequence
  SARM1 targeting guide sequence portion
gcuucgcccgcugucuggugg

SEQ ID NO: 5270 - RNA, 21 nt, Artificial Sequence
  SARM1 targeting guide sequence portion
gcuucggcugcacgccugccu

SEQ ID NO: 5271 - RNA, 21 nt, Artificial Sequence
  SARM1 targeting guide sequence portion
gcuucucuaccaugcgucgcu

SEQ ID NO: 5272 - RNA, 21 nt, Artificial Sequence
  SARM1 targeting guide sequence portion
gcuugaacaugugcuccaaga

SEQ ID NO: 5273 - RNA, 21 nt, Artificial Sequence
  SARM1 targeting guide sequence portion
gcuuggaggcgcagugcaucg

SEQ ID NO: 5274 - RNA, 21 nt, Artificial Sequence
  SARM1 targeting guide sequence portion
gcuuguggccucgcuggaccc

SEQ ID NO: 5275 - RNA, 21 nt, Artificial Sequence
  SARM1 targeting guide sequence portion
gcuugugucgcuggcguccac

SEQ ID NO: 5276 - RNA, 21 nt, Artificial Sequence
  SARM1 targeting guide sequence portion
gcuuucuaccucugcgccgag

SEQ ID NO: 5277 - RNA, 21 nt, Artificial Sequence
  SARM1 targeting guide sequence portion
ggaacgcgaacccguagagcu

SEQ ID NO: 5278 - RNA, 21 nt, Artificial Sequence
  SARM1 targeting guide sequence portion
ggaagagccacucggcugcgc

SEQ ID NO: 5279 - RNA, 21 nt, Artificial Sequence
  SARM1 targeting guide sequence portion
ggaccccgcgcugcugcgcca

SEQ ID NO: 5280 - RNA, 21 nt, Artificial Sequence
  SARM1 targeting guide sequence portion
ggacccuggccgcuucgcccg

SEQ ID NO: 5281 - RNA, 21 nt, Artificial Sequence
  SARM1 targeting guide sequence portion
ggacgagcugcuucggcugca

SEQ ID NO: 5282 - RNA, 21 nt, Artificial Sequence
  SARM1 targeting guide sequence portion
ggacgccagcgacacaagcca

SEQ ID NO: 5283 - RNA, 21 nt, Artificial Sequence
  SARM1 targeting guide sequence portion
ggacgcggugcuguauuggug

SEQ ID NO: 5284 - RNA, 21 nt, Artificial Sequence
  SARM1 targeting guide sequence portion
ggagaaggcgagcgggaagag

SEQ ID NO: 5285 - RNA, 21 nt, Artificial Sequence
  SARM1 targeting guide sequence portion
ggagacaugccagaggcuggu

SEQ ID NO: 5286 - RNA, 21 nt, Artificial Sequence
  SARM1 targeting guide sequence portion
ggagcacauguucaagcauuc

SEQ ID NO: 5287 - RNA, 21 nt, Artificial Sequence
  SARM1 targeting guide sequence portion
ggagccgcuuguggccucgcu

SEQ ID NO: 5288 - RNA, 21 nt, Artificial Sequence
  SARM1 targeting guide sequence portion
ggagcgcgagguggagcgcuc

SEQ ID NO: 5289 - RNA, 21 nt, Artificial Sequence
  SARM1 targeting guide sequence portion
ggagcgcucgggcacgcuggc

SEQ ID NO: 5290 - RNA, 21 nt, Artificial Sequence
  SARM1 targeting guide sequence portion
ggagcguggcaggcaucuugg

SEQ ID NO: 5291 - RNA, 21 nt, Artificial Sequence
  SARM1 targeting guide sequence portion
ggaggacgagcugcuucggcu

SEQ ID NO: 5292 - RNA, 21 nt, Artificial Sequence
  SARM1 targeting guide sequence portion
ggaggagacaugccagaggcu

SEQ ID NO: 5293 - RNA, 21 nt, Artificial Sequence
  SARM1 targeting guide sequence portion
ggaggcgcagugcaucggggc

SEQ ID NO: 5294 - RNA, 21 nt, Artificial Sequence
  SARM1 targeting guide sequence portion
ggagguggagcgcgaggugga

SEQ ID NO: 5295 - RNA, 21 nt, Artificial Sequence
  SARM1 targeting guide sequence portion
ggaucacgcccagcccaaugc

SEQ ID NO: 5296 - RNA, 21 nt, Artificial Sequence
  SARM1 targeting guide sequence portion
ggcaacugcgcgcugcacggg

SEQ ID NO: 5297 - RNA, 21 nt, Artificial Sequence
  SARM1 targeting guide sequence portion
ggcaccaauacagcaccgcgu

SEQ ID NO: 5298 - RNA, 21 nt, Artificial Sequence
  SARM1 targeting guide sequence portion
ggcacgaggcgcugcaggucg

SEQ ID NO: 5299 - RNA, 21 nt, Artificial Sequence
  SARM1 targeting guide sequence portion
ggcacgcuggcgcucguggag

SEQ ID NO: 5300 - RNA, 21 nt, Artificial Sequence
  SARM1 targeting guide sequence portion
ggcagagaccgcguggcgcgc

SEQ ID NO: 5301 - RNA, 21 nt, Artificial Sequence
  SARM1 targeting guide sequence portion
ggcagccucggcgcagaggua

SEQ ID NO: 5302 - RNA, 21 nt, Artificial Sequence
  SARM1 targeting guide sequence portion
ggcaggcaucuuggagcacau

SEQ ID NO: 5303 - RNA, 21 nt, Artificial Sequence
  SARM1 targeting guide sequence portion
ggcaggcgugcagccgaagca

SEQ ID NO: 5304 - RNA, 21 nt, Artificial Sequence
  SARM1 targeting guide sequence portion
ggcaucuuggagcacauguuc

SEQ ID NO: 5305 - RNA, 21 nt, Artificial Sequence
  SARM1 targeting guide sequence portion
ggcaugucuccuccgaaugcu

SEQ ID NO: 5306 - RNA, 21 nt, Artificial Sequence
  SARM1 targeting guide sequence portion
ggccacaagcggcuccacgag

SEQ ID NO: 5307 - RNA, 21 nt, Artificial Sequence
  SARM1 targeting guide sequence portion
ggccaggcggugcagcgacgc

SEQ ID NO: 5308 - RNA, 21 nt, Artificial Sequence
  SARM1 targeting guide sequence portion
ggccaggguccagcgaggcca

SEQ ID NO: 5309 - RNA, 21 nt, Artificial Sequence
  SARM1 targeting guide sequence portion
ggcccccgugcagcgcgcagu

SEQ ID NO: 5310 - RNA, 21 nt, Artificial Sequence
  SARM1 targeting guide sequence portion
ggcccgacgaccugcagcgcc

SEQ ID NO: 5311 - RNA, 21 nt, Artificial Sequence
  SARM1 targeting guide sequence portion
ggcccgcggcccuggcuugug

SEQ ID NO: 5312 - RNA, 21 nt, Artificial Sequence
  SARM1 targeting guide sequence portion
ggcccuggcuugugucgcugg

SEQ ID NO: 5313 - RNA, 21 nt, Artificial Sequence
  SARM1 targeting guide sequence portion
ggccgccaccagccucuggca

SEQ ID NO: 5314 - RNA, 21 nt, Artificial Sequence
  SARM1 targeting guide sequence portion
ggccgcuucgcccgcugucug

SEQ ID NO: 5315 - RNA, 21 nt, Artificial Sequence
  SARM1 targeting guide sequence portion
ggccggcggccuggacgcggu

SEQ ID NO: 5316 - RNA, 21 nt, Artificial Sequence
  SARM1 targeting guide sequence portion
ggccucgcuggacccuggccg

SEQ ID NO: 5317 - RNA, 21 nt, Artificial Sequence
  SARM1 targeting guide sequence portion
ggccuggacgcggugcuguau

SEQ ID NO: 5318 - RNA, 21 nt, Artificial Sequence
  SARM1 targeting guide sequence portion
ggcgaagcggccaggguccag

SEQ ID NO: 5319 - RNA, 21 nt, Artificial Sequence
  SARM1 targeting guide sequence portion
ggcgaaggaacgcgaacccgu

SEQ ID NO: 5320 - RNA, 21 nt, Artificial Sequence
  SARM1 targeting guide sequence portion
ggcgacuaacaaggaggugga

SEQ ID NO: 5321 - RNA, 21 nt, Artificial Sequence
  SARM1 targeting guide sequence portion
ggcgagcgggaagagccacuc

SEQ ID NO: 5322 - RNA, 21 nt, Artificial Sequence
  SARM1 targeting guide sequence portion
ggcgcagagguagaaagcccc

SEQ ID NO: 5323 - RNA, 21 nt, Artificial Sequence
  SARM1 targeting guide sequence portion
ggcgcagugcaucggggcuuu

SEQ ID NO: 5324 - RNA, 21 nt, Artificial Sequence
  SARM1 targeting guide sequence portion
ggcgcgcauugggcugggcgu

SEQ ID NO: 5325 - RNA, 21 nt, Artificial Sequence
  SARM1 targeting guide sequence portion
ggcgcggagcguggcaggcau

SEQ ID NO: 5326 - RNA, 21 nt, Artificial Sequence
  SARM1 targeting guide sequence portion
ggcgcucguggagccgcuugu

SEQ ID NO: 5327 - RNA, 21 nt, Artificial Sequence
  SARM1 targeting guide sequence portion
ggcgcugggcaacugcgcgcu

SEQ ID NO: 5328 - RNA, 21 nt, Artificial Sequence
  SARM1 targeting guide sequence portion
ggcggcaccaauacagcaccg

SEQ ID NO: 5329 - RNA, 21 nt, Artificial Sequence
  SARM1 targeting guide sequence portion
ggcggccuggacgcggugcug

SEQ ID NO: 5330 - RNA, 21 nt, Artificial Sequence
  SARM1 targeting guide sequence portion
ggcggugcagcgacgcauggu

SEQ ID NO: 5331 - RNA, 21 nt, Artificial Sequence
  SARM1 targeting guide sequence portion
ggcguccaccagacagcgggc

SEQ ID NO: 5332 - RNA, 21 nt, Artificial Sequence
  SARM1 targeting guide sequence portion
ggcgugauccugaaccuggcg

SEQ ID NO: 5333 - RNA, 21 nt, Artificial Sequence
  SARM1 targeting guide sequence portion
ggcgugcagccgaagcagcuc

SEQ ID NO: 5334 - RNA, 21 nt, Artificial Sequence
  SARM1 targeting guide sequence portion
ggcuccacgagcgccagcgug

SEQ ID NO: 5335 - RNA, 21 nt, Artificial Sequence
  SARM1 targeting guide sequence portion
ggcucuucccgcucgccuucu

SEQ ID NO: 5336 - RNA, 21 nt, Artificial Sequence
  SARM1 targeting guide sequence portion
ggcucuugauggcagccucgg

SEQ ID NO: 5337 - RNA, 21 nt, Artificial Sequence
  SARM1 targeting guide sequence portion
ggcugcacgccugccucgcag

SEQ ID NO: 5338 - RNA, 21 nt, Artificial Sequence
  SARM1 targeting guide sequence portion
ggcugccaucaagagccugca

SEQ ID NO: 5339 - RNA, 21 nt, Artificial Sequence
  SARM1 targeting guide sequence portion
ggcugcgcgcuucucuaccau

SEQ ID NO: 5340 - RNA, 21 nt, Artificial Sequence
  SARM1 targeting guide sequence portion
ggcugggcgugauccugaacc

SEQ ID NO: 5341 - RNA, 21 nt, Artificial Sequence
  SARM1 targeting guide sequence portion
ggcuugugucgcuggcgucca

SEQ ID NO: 5342 - RNA, 21 nt, Artificial Sequence
  SARM1 targeting guide sequence portion
ggcuuucuaccucugcgccga

SEQ ID NO: 5343 - RNA, 21 nt, Artificial Sequence
  SARM1 targeting guide sequence portion
gggaagagccacucggcugcg

SEQ ID NO: 5344 - RNA, 21 nt, Artificial Sequence
  SARM1 targeting guide sequence portion
gggcaacugcgcgcugcacgg

SEQ ID NO: 5345 - RNA, 21 nt, Artificial Sequence
  SARM1 targeting guide sequence portion
gggcacgcuggcgcucgugga

SEQ ID NO: 5346 - RNA, 21 nt, Artificial Sequence
  SARM1 targeting guide sequence portion
gggcagagaccgcguggcgcg

SEQ ID NO: 5347 - RNA, 21 nt, Artificial Sequence
  SARM1 targeting guide sequence portion
gggccaggcggugcagcgacg

SEQ ID NO: 5348 - RNA, 21 nt, Artificial Sequence
  SARM1 targeting guide sequence portion
gggcccgacgaccugcagcgc

SEQ ID NO: 5349 - RNA, 21 nt, Artificial Sequence
  SARM1 targeting guide sequence portion
gggcccgcggcccuggcuugu

SEQ ID NO: 5350 - RNA, 21 nt, Artificial Sequence
  SARM1 targeting guide sequence portion
gggcgaagcggccagggucca

SEQ ID NO: 5351 - RNA, 21 nt, Artificial Sequence
  SARM1 targeting guide sequence portion
gggcgugauccugaaccuggc

SEQ ID NO: 5352 - RNA, 21 nt, Artificial Sequence
  SARM1 targeting guide sequence portion
gggcugggcgugauccugaac

SEQ ID NO: 5353 - RNA, 21 nt, Artificial Sequence
  SARM1 targeting guide sequence portion
gggcuuucuaccucugcgccg

SEQ ID NO: 5354 - RNA, 21 nt, Artificial Sequence
  SARM1 targeting guide sequence portion
ggggccaggcggugcagcgac

SEQ ID NO: 5355 - RNA, 21 nt, Artificial Sequence
  SARM1 targeting guide sequence portion
ggggcuuucuaccucugcgcc

SEQ ID NO: 5356 - RNA, 21 nt, Artificial Sequence
  SARM1 targeting guide sequence portion
gggggccaggcggugcagcga

SEQ ID NO: 5357 - RNA, 21 nt, Artificial Sequence
  SARM1 targeting guide sequence portion
gggguccgugcggcggcacca

SEQ ID NO: 5358 - RNA, 21 nt, Artificial Sequence
  SARM1 targeting guide sequence portion
ggguccagcgaggccacaagc

SEQ ID NO: 5359 - RNA, 21 nt, Artificial Sequence
  SARM1 targeting guide sequence portion
ggguccgugcggcggcaccaa

SEQ ID NO: 5360 - RNA, 21 nt, Artificial Sequence
  SARM1 targeting guide sequence portion
ggguucgcguuccuucgccag

SEQ ID NO: 5361 - RNA, 21 nt, Artificial Sequence
  SARM1 targeting guide sequence portion
gguagaaagccccgaugcacu

SEQ ID NO: 5362 - RNA, 21 nt, Artificial Sequence
  SARM1 targeting guide sequence portion
gguagagaagcgcgcagccga

SEQ ID NO: 5363 - RNA, 21 nt, Artificial Sequence
  SARM1 targeting guide sequence portion
gguccagcgaggccacaagcg

SEQ ID NO: 5364 - RNA, 21 nt, Artificial Sequence
  SARM1 targeting guide sequence portion
gguccgugcggcggcaccaau

SEQ ID NO: 5365 - RNA, 21 nt, Artificial Sequence
  SARM1 targeting guide sequence portion
ggucgucgggcccgcggcccu

SEQ ID NO: 5366 - RNA, 21 nt, Artificial Sequence
  SARM1 targeting guide sequence portion
ggucuugccuugcaggcucuu

SEQ ID NO: 5367 - RNA, 21 nt, Artificial Sequence
  SARM1 targeting guide sequence portion
ggugcagcgacgcaugguaga

SEQ ID NO: 5368 - RNA, 21 nt, Artificial Sequence
  SARM1 targeting guide sequence portion
ggugcuguauuggugccgccg

SEQ ID NO: 5369 - RNA, 21 nt, Artificial Sequence
  SARM1 targeting guide sequence portion
gguggacgccagcgacacaag

SEQ ID NO: 5370 - RNA, 21 nt, Artificial Sequence
  SARM1 targeting guide sequence portion
gguggagcgcgagguggagcg

SEQ ID NO: 5371 - RNA, 21 nt, Artificial Sequence
  SARM1 targeting guide sequence portion
gguggagcgcucgggcacgcu

SEQ ID NO: 5372 - RNA, 21 nt, Artificial Sequence
  SARM1 targeting guide sequence portion
gguguuggcgacuaacaagga

SEQ ID NO: 5373 - RNA, 21 nt, Artificial Sequence
  SARM1 targeting guide sequence portion
gguuagagucgagcaacggca

SEQ ID NO: 5374 - RNA, 21 nt, Artificial Sequence
  SARM1 targeting guide sequence portion
gguucaggaucacgcccagcc

SEQ ID NO: 5375 - RNA, 21 nt, Artificial Sequence
  SARM1 targeting guide sequence portion
gguucgcguuccuucgccagg

SEQ ID NO: 5376 - RNA, 21 nt, Artificial Sequence
  SARM1 targeting guide sequence portion
guagaaagccccgaugcacug

SEQ ID NO: 5377 - RNA, 21 nt, Artificial Sequence
  SARM1 targeting guide sequence portion
guagagaagcgcgcagccgag

SEQ ID NO: 5378 - RNA, 21 nt, Artificial Sequence
  SARM1 targeting guide sequence portion
guagagcuggcgcggagcgug

SEQ ID NO: 5379 - RNA, 21 nt, Artificial Sequence
  SARM1 targeting guide sequence portion
guagcgguguuggcgacuaac

SEQ ID NO: 5380 - RNA, 21 nt, Artificial Sequence
  SARM1 targeting guide sequence portion
guauuggugccgccgcacgga

SEQ ID NO: 5381 - RNA, 21 nt, Artificial Sequence
  SARM1 targeting guide sequence portion
guccaccagacagcgggcgaa

SEQ ID NO: 5382 - RNA, 21 nt, Artificial Sequence
  SARM1 targeting guide sequence portion
guccagcgaggccacaagcgg

SEQ ID NO: 5383 - RNA, 21 nt, Artificial Sequence
  SARM1 targeting guide sequence portion
guccaggccgccggccgccac

SEQ ID NO: 5384 - RNA, 21 nt, Artificial Sequence
  SARM1 targeting guide sequence portion
guccgugcggcggcaccaaua

SEQ ID NO: 5385 - RNA, 21 nt, Artificial Sequence
  SARM1 targeting guide sequence portion
guccuccuuggagaaggcgag

SEQ ID NO: 5386 - RNA, 21 nt, Artificial Sequence
  SARM1 targeting guide sequence portion
gucgagcaacggcacgaggcg

SEQ ID NO: 5387 - RNA, 21 nt, Artificial Sequence
  SARM1 targeting guide sequence portion
gucgccaacaccgcuacugcg

SEQ ID NO: 5388 - RNA, 21 nt, Artificial Sequence
  SARM1 targeting guide sequence portion
gucgcugcaccgccuggcccc

SEQ ID NO: 5389 - RNA, 21 nt, Artificial Sequence
  SARM1 targeting guide sequence portion
gucgcuggcguccaccagaca

SEQ ID NO: 5390 - RNA, 21 nt, Artificial Sequence
  SARM1 targeting guide sequence portion
gucgggcccgcggcccuggcu

SEQ ID NO: 5391 - RNA, 21 nt, Artificial Sequence
  SARM1 targeting guide sequence portion
gucgucgggcccgcggcccug

SEQ ID NO: 5392 - RNA, 21 nt, Artificial Sequence
  SARM1 targeting guide sequence portion
gucuccuccgaaugcuugaac

SEQ ID NO: 5393 - RNA, 21 nt, Artificial Sequence
  SARM1 targeting guide sequence portion
gucugguggacgccagcgaca

SEQ ID NO: 5394 - RNA, 21 nt, Artificial Sequence
  SARM1 targeting guide sequence portion
gucuugccuugcaggcucuug

SEQ ID NO: 5395 - RNA, 21 nt, Artificial Sequence
  SARM1 targeting guide sequence portion
gugauccugaaccuggcgaag

SEQ ID NO: 5396 - RNA, 21 nt, Artificial Sequence
  SARM1 targeting guide sequence portion
gugcagccgaagcagcucguc

SEQ ID NO: 5397 - RNA, 21 nt, Artificial Sequence
  SARM1 targeting guide sequence portion
gugcagcgacgcaugguagag

SEQ ID NO: 5398 - RNA, 21 nt, Artificial Sequence
  SARM1 targeting guide sequence portion
gugcagcgcgcaguugcccag

SEQ ID NO: 5399 - RNA, 21 nt, Artificial Sequence
  SARM1 targeting guide sequence portion
gugcaucggggcuuucuaccu

SEQ ID NO: 5400 - RNA, 21 nt, Artificial Sequence
  SARM1 targeting guide sequence portion
gugcccgagcgcuccaccucg

SEQ ID NO: 5401 - RNA, 21 nt, Artificial Sequence
  SARM1 targeting guide sequence portion
gugccgccgcacggaccccgc

SEQ ID NO: 5402 - RNA, 21 nt, Artificial Sequence
  SARM1 targeting guide sequence portion
gugccguugcucgacucuaac

SEQ ID NO: 5403 - RNA, 21 nt, Artificial Sequence
  SARM1 targeting guide sequence portion
gugcggcggcaccaauacagc

SEQ ID NO: 5404 - RNA, 21 nt, Artificial Sequence
  SARM1 targeting guide sequence portion
gugcuccaagaugccugccac

SEQ ID NO: 5405 - RNA, 21 nt, Artificial Sequence
  SARM1 targeting guide sequence portion
gugcuguauuggugccgccgc

SEQ ID NO: 5406 - RNA, 21 nt, Artificial Sequence
  SARM1 targeting guide sequence portion
guggacgccagcgacacaagc

SEQ ID NO: 5407 - RNA, 21 nt, Artificial Sequence
  SARM1 targeting guide sequence portion
guggagccgcuuguggccucg

SEQ ID NO: 5408 - RNA, 21 nt, Artificial Sequence
  SARM1 targeting guide sequence portion
guggagcgcgagguggagcgc

SEQ ID NO: 5409 - RNA, 21 nt, Artificial Sequence
  SARM1 targeting guide sequence portion
guggagcgcucgggcacgcug

SEQ ID NO: 5410 - RNA, 21 nt, Artificial Sequence
  SARM1 targeting guide sequence portion
guggcaggcaucuuggagcac

SEQ ID NO: 5411 - RNA, 21 nt, Artificial Sequence
  SARM1 targeting guide sequence portion
guggccucgcuggacccuggc

SEQ ID NO: 5412 - RNA, 21 nt, Artificial Sequence
  SARM1 targeting guide sequence portion
guggcgcagcagcgcgggguc

SEQ ID NO: 5413 - RNA, 21 nt, Artificial Sequence
  SARM1 targeting guide sequence portion
guggcgcgcauugggcugggc

SEQ ID NO: 5414 - RNA, 21 nt, Artificial Sequence
  SARM1 targeting guide sequence portion
guggcucuucccgcucgccuu

SEQ ID NO: 5415 - RNA, 21 nt, Artificial Sequence
  SARM1 targeting guide sequence portion
gugucgcuggcguccaccaga

SEQ ID NO: 5416 - RNA, 21 nt, Artificial Sequence
  SARM1 targeting guide sequence portion
guguuggcgacuaacaaggag

SEQ ID NO: 5417 - RNA, 21 nt, Artificial Sequence
  SARM1 targeting guide sequence portion
guuagagucgagcaacggcac

SEQ ID NO: 5418 - RNA, 21 nt, Artificial Sequence
  SARM1 targeting guide sequence portion
guuagucgccaacaccgcuac

SEQ ID NO: 5419 - RNA, 21 nt, Artificial Sequence
  SARM1 targeting guide sequence portion
guucaagcauucggaggagac

SEQ ID NO: 5420 - RNA, 21 nt, Artificial Sequence
  SARM1 targeting guide sequence portion
guucaggaucacgcccagccc

SEQ ID NO: 5421 - RNA, 21 nt, Artificial Sequence
  SARM1 targeting guide sequence portion
guuccuucgccagguucagga

SEQ ID NO: 5422 - RNA, 21 nt, Artificial Sequence
  SARM1 targeting guide sequence portion
guucgcguuccuucgccaggu

SEQ ID NO: 5423 - RNA, 21 nt, Artificial Sequence
  SARM1 targeting guide sequence portion
guugcccagcgccagcgcgca

SEQ ID NO: 5424 - RNA, 21 nt, Artificial Sequence
  SARM1 targeting guide sequence portion
guugcucgacucuaaccgcuu

SEQ ID NO: 5425 - RNA, 21 nt, Artificial Sequence
  SARM1 targeting guide sequence portion
guuggcgacuaacaaggaggu

SEQ ID NO: 5426 - RNA, 21 nt, Artificial Sequence
  SARM1 targeting guide sequence portion
uaacaaggagguggagcgcga

SEQ ID NO: 5427 - RNA, 21 nt, Artificial Sequence
  SARM1 targeting guide sequence portion
uaaccgcuuggaggcgcagug

SEQ ID NO: 5428 - RNA, 21 nt, Artificial Sequence
  SARM1 targeting guide sequence portion
uacagcaccgcguccaggccg

SEQ ID NO: 5429 - RNA, 21 nt, Artificial Sequence
  SARM1 targeting guide sequence portion
uaccaugcgucgcugcaccgc

SEQ ID NO: 5430 - RNA, 21 nt, Artificial Sequence
  SARM1 targeting guide sequence portion
uaccucugcgccgaggcugcc

SEQ ID NO: 5431 - RNA, 21 nt, Artificial Sequence
  SARM1 targeting guide sequence portion
uacggguucgcguuccuucgc

SEQ ID NO: 5432 - RNA, 21 nt, Artificial Sequence
  SARM1 targeting guide sequence portion
uacugcgaggcaggcgugcag

SEQ ID NO: 5433 - RNA, 21 nt, Artificial Sequence
  SARM1 targeting guide sequence portion
uagaaagccccgaugcacugc

SEQ ID NO: 5434 - RNA, 21 nt, Artificial Sequence
  SARM1 targeting guide sequence portion
uagagaagcgcgcagccgagu

SEQ ID NO: 5435 - RNA, 21 nt, Artificial Sequence
  SARM1 targeting guide sequence portion
uagagcuggcgcggagcgugg

SEQ ID NO: 5436 - RNA, 21 nt, Artificial Sequence
  SARM1 targeting guide sequence portion
uagagucgagcaacggcacga

SEQ ID NO: 5437 - RNA, 21 nt, Artificial Sequence
  SARM1 targeting guide sequence portion
uagcgguguuggcgacuaaca

SEQ ID NO: 5438 - RNA, 21 nt, Artificial Sequence
  SARM1 targeting guide sequence portion
uagucgccaacaccgcuacug

SEQ ID NO: 5439 - RNA, 21 nt, Artificial Sequence
  SARM1 targeting guide sequence portion
uauuggugccgccgcacggac

SEQ ID NO: 5440 - RNA, 21 nt, Artificial Sequence
  SARM1 targeting guide sequence portion
ucaagagccugcaaggcaaga

SEQ ID NO: 5441 - RNA, 21 nt, Artificial Sequence
  SARM1 targeting guide sequence portion
ucaagcauucggaggagacau

SEQ ID NO: 5442 - RNA, 21 nt, Artificial Sequence
  SARM1 targeting guide sequence portion
ucacgcccagcccaaugcgcg

SEQ ID NO: 5443 - RNA, 21 nt, Artificial Sequence
  SARM1 targeting guide sequence portion
ucaggaucacgcccagcccaa

SEQ ID NO: 5444 - RNA, 21 nt, Artificial Sequence
  SARM1 targeting guide sequence portion
uccaagaugccugccacgcuc

SEQ ID NO: 5445 - RNA, 21 nt, Artificial Sequence
  SARM1 targeting guide sequence portion
uccaagcgguuagagucgagc

SEQ ID NO: 5446 - RNA, 21 nt, Artificial Sequence
  SARM1 targeting guide sequence portion
uccaaggaggacgagcugcuu

SEQ ID NO: 5447 - RNA, 21 nt, Artificial Sequence
  SARM1 targeting guide sequence portion
uccaccagacagcgggcgaag

SEQ ID NO: 5448 - RNA, 21 nt, Artificial Sequence
  SARM1 targeting guide sequence portion
uccaccuccuuguuagucgcc

SEQ ID NO: 5449 - RNA, 21 nt, Artificial Sequence
  SARM1 targeting guide sequence portion
uccaccucgcgcuccaccucc

SEQ ID NO: 5450 - RNA, 21 nt, Artificial Sequence
  SARM1 targeting guide sequence portion
uccacgagcgccagcgugccc

SEQ ID NO: 5451 - RNA, 21 nt, Artificial Sequence
  SARM1 targeting guide sequence portion
uccagcgaggccacaagcggc

SEQ ID NO: 5452 - RNA, 21 nt, Artificial Sequence
  SARM1 targeting guide sequence portion
uccaggccgccggccgccacc

SEQ ID NO: 5453 - RNA, 21 nt, Artificial Sequence
  SARM1 targeting guide sequence portion
ucccgcucgccuucuccaagg

SEQ ID NO: 5454 - RNA, 21 nt, Artificial Sequence
  SARM1 targeting guide sequence portion
uccgaaugcuugaacaugugc

SEQ ID NO: 5455 - RNA, 21 nt, Artificial Sequence
  SARM1 targeting guide sequence portion
uccgcgccagcucuacggguu

SEQ ID NO: 5456 - RNA, 21 nt, Artificial Sequence
  SARM1 targeting guide sequence portion
uccgugcggcggcaccaauac

SEQ ID NO: 5457 - RNA, 21 nt, Artificial Sequence
  SARM1 targeting guide sequence portion
uccuccgaaugcuugaacaug

SEQ ID NO: 5458 - RNA, 21 nt, Artificial Sequence
  SARM1 targeting guide sequence portion
uccuccuuggagaaggcgagc

SEQ ID NO: 5459 - RNA, 21 nt, Artificial Sequence
  SARM1 targeting guide sequence portion
uccugaaccuggcgaaggaac

SEQ ID NO: 5460 - RNA, 21 nt, Artificial Sequence
  SARM1 targeting guide sequence portion
uccuucgccagguucaggauc

SEQ ID NO: 5461 - RNA, 21 nt, Artificial Sequence
  SARM1 targeting guide sequence portion
uccuuggagaaggcgagcggg

SEQ ID NO: 5462 - RNA, 21 nt, Artificial Sequence
  SARM1 targeting guide sequence portion
uccuuguuagucgccaacacc

SEQ ID NO: 5463 - RNA, 21 nt, Artificial Sequence
  SARM1 targeting guide sequence portion
ucgacucuaaccgcuuggagg

SEQ ID NO: 5464 - RNA, 21 nt, Artificial Sequence
  SARM1 targeting guide sequence portion
ucgagcaacggcacgaggcgc

SEQ ID NO: 5465 - RNA, 21 nt, Artificial Sequence
  SARM1 targeting guide sequence portion
ucgcaguagcgguguuggcga

SEQ ID NO: 5466 - RNA, 21 nt, Artificial Sequence
  SARM1 targeting guide sequence portion
ucgccaacaccgcuacugcga

SEQ ID NO: 5467 - RNA, 21 nt, Artificial Sequence
  SARM1 targeting guide sequence portion
ucgccagguucaggaucacgc

SEQ ID NO: 5468 - RNA, 21 nt, Artificial Sequence
  SARM1 targeting guide sequence portion
ucgcccgcugucugguggacg

SEQ ID NO: 5469 - RNA, 21 nt, Artificial Sequence
  SARM1 targeting guide sequence portion
ucgccuucuccaaggaggacg

SEQ ID NO: 5470 - RNA, 21 nt, Artificial Sequence
  SARM1 targeting guide sequence portion
ucgcgcuccaccuccuuguua

SEQ ID NO: 5471 - RNA, 21 nt, Artificial Sequence
  SARM1 targeting guide sequence portion
ucgcguuccuucgccagguuc

SEQ ID NO: 5472 - RNA, 21 nt, Artificial Sequence
  SARM1 targeting guide sequence portion
ucgcugcaccgccuggccccc

SEQ ID NO: 5473 - RNA, 21 nt, Artificial Sequence
  SARM1 targeting guide sequence portion
ucgcuggacccuggccgcuuc

SEQ ID NO: 5474 - RNA, 21 nt, Artificial Sequence
  SARM1 targeting guide sequence portion
ucgcuggcguccaccagacag

SEQ ID NO: 5475 - RNA, 21 nt, Artificial Sequence
  SARM1 targeting guide sequence portion
ucggaggagacaugccagagg

SEQ ID NO: 5476 - RNA, 21 nt, Artificial Sequence
  SARM1 targeting guide sequence portion
ucggcgcagagguagaaagcc

SEQ ID NO: 5477 - RNA, 21 nt, Artificial Sequence
  SARM1 targeting guide sequence portion
ucggcugcacgccugccucgc

SEQ ID NO: 5478 - RNA, 21 nt, Artificial Sequence
  SARM1 targeting guide sequence portion
ucggcugcgcgcuucucuacc

SEQ ID NO: 5479 - RNA, 21 nt, Artificial Sequence
  SARM1 targeting guide sequence portion
ucgggcacgcuggcgcucgug

SEQ ID NO: 5480 - RNA, 21 nt, Artificial Sequence
  SARM1 targeting guide sequence portion
ucgggcccgcggcccuggcuu

SEQ ID NO: 5481 - RNA, 21 nt, Artificial Sequence
  SARM1 targeting guide sequence portion
ucggggcuuucuaccucugcg

SEQ ID NO: 5482 - RNA, 21 nt, Artificial Sequence
  SARM1 targeting guide sequence portion
ucguccuccuuggagaaggcg

SEQ ID NO: 5483 - RNA, 21 nt, Artificial Sequence
  SARM1 targeting guide sequence portion
ucgucgggcccgcggcccugg

SEQ ID NO: 5484 - RNA, 21 nt, Artificial Sequence
  SARM1 targeting guide sequence portion
ucgugccguugcucgacucua

SEQ ID NO: 5485 - RNA, 21 nt, Artificial Sequence
  SARM1 targeting guide sequence portion
ucguggagccgcuuguggccu

SEQ ID NO: 5486 - RNA, 21 nt, Artificial Sequence
  SARM1 targeting guide sequence portion
ucuaaccgcuuggaggcgcag

SEQ ID NO: 5487 - RNA, 21 nt, Artificial Sequence
  SARM1 targeting guide sequence portion
ucuaccaugcgucgcugcacc

SEQ ID NO: 5488 - RNA, 21 nt, Artificial Sequence
  SARM1 targeting guide sequence portion
ucuaccucugcgccgaggcug

SEQ ID NO: 5489 - RNA, 21 nt, Artificial Sequence
  SARM1 targeting guide sequence portion
ucuacggguucgcguuccuuc

SEQ ID NO: 5490 - RNA, 21 nt, Artificial Sequence
  SARM1 targeting guide sequence portion
ucuccaaggaggacgagcugc

SEQ ID NO: 5491 - RNA, 21 nt, Artificial Sequence
  SARM1 targeting guide sequence portion
ucuccuccgaaugcuugaaca

SEQ ID NO: 5492 - RNA, 21 nt, Artificial Sequence
  SARM1 targeting guide sequence portion
ucucuaccaugcgucgcugca

SEQ ID NO: 5493 - RNA, 21 nt, Artificial Sequence
  SARM1 targeting guide sequence portion
ucugcgccgaggcugccauca

SEQ ID NO: 5494 - RNA, 21 nt, Artificial Sequence
  SARM1 targeting guide sequence portion
ucuggcaugucuccuccgaau

SEQ ID NO: 5495 - RNA, 21 nt, Artificial Sequence
  SARM1 targeting guide sequence portion
ucugguggacgccagcgacac

SEQ ID NO: 5496 - RNA, 21 nt, Artificial Sequence
  SARM1 targeting guide sequence portion
ucuucccgcucgccuucucca

SEQ ID NO: 5497 - RNA, 21 nt, Artificial Sequence
  SARM1 targeting guide sequence portion
ucuugauggcagccucggcgc

SEQ ID NO: 5498 - RNA, 21 nt, Artificial Sequence
  SARM1 targeting guide sequence portion
ucuugccuugcaggcucuuga

SEQ ID NO: 5499 - RNA, 21 nt, Artificial Sequence
  SARM1 targeting guide sequence portion
ucuuggagcacauguucaagc

SEQ ID NO: 5500 - RNA, 21 nt, Artificial Sequence
  SARM1 targeting guide sequence portion
ugaacaugugcuccaagaugc

SEQ ID NO: 5501 - RNA, 21 nt, Artificial Sequence
  SARM1 targeting guide sequence portion
ugaaccuggcgaaggaacgcg

SEQ ID NO: 5502 - RNA, 21 nt, Artificial Sequence
  SARM1 targeting guide sequence portion
ugauccugaaccuggcgaagg

SEQ ID NO: 5503 - RNA, 21 nt, Artificial Sequence
  SARM1 targeting guide sequence portion
ugauggcagccucggcgcaga

SEQ ID NO: 5504 - RNA, 21 nt, Artificial Sequence
  SARM1 targeting guide sequence portion
ugcaccgccuggcccccgugc

SEQ ID NO: 5505 - RNA, 21 nt, Artificial Sequence
  SARM1 targeting guide sequence portion
ugcacgccugccucgcaguag

SEQ ID NO: 5506 - RNA, 21 nt, Artificial Sequence
  SARM1 targeting guide sequence portion
ugcacgggggccaggcggugc

SEQ ID NO: 5507 - RNA, 21 nt, Artificial Sequence
  SARM1 targeting guide sequence portion
ugcacugcgccuccaagcggu

SEQ ID NO: 5508 - RNA, 21 nt, Artificial Sequence
  SARM1 targeting guide sequence portion
ugcagccgaagcagcucgucc

SEQ ID NO: 5509 - RNA, 21 nt, Artificial Sequence
  SARM1 targeting guide sequence portion
ugcagcgacgcaugguagaga

SEQ ID NO: 5510 - RNA, 21 nt, Artificial Sequence
  SARM1 targeting guide sequence portion
ugcagcgccucgugccguugc

SEQ ID NO: 5511 - RNA, 21 nt, Artificial Sequence
  SARM1 targeting guide sequence portion
ugcagcgcgcaguugcccagc

SEQ ID NO: 5512 - RNA, 21 nt, Artificial Sequence
  SARM1 targeting guide sequence portion
ugcaggcucuugauggcagcc

SEQ ID NO: 5513 - RNA, 21 nt, Artificial Sequence
  SARM1 targeting guide sequence portion
ugcaggucgucgggcccgcgg

SEQ ID NO: 5514 - RNA, 21 nt, Artificial Sequence
  SARM1 targeting guide sequence portion
ugcaucggggcuuucuaccuc

SEQ ID NO: 5515 - RNA, 21 nt, Artificial Sequence
  SARM1 targeting guide sequence portion
ugccacgcuccgcgccagcuc

SEQ ID NO: 5516 - RNA, 21 nt, Artificial Sequence
  SARM1 targeting guide sequence portion
ugccagaggcugguggcggcc

SEQ ID NO: 5517 - RNA, 21 nt, Artificial Sequence
  SARM1 targeting guide sequence portion
ugccaucaagagccugcaagg

SEQ ID NO: 5518 - RNA, 21 nt, Artificial Sequence
  SARM1 targeting guide sequence portion
ugcccagcgccagcgcgcagu

SEQ ID NO: 5519 - RNA, 21 nt, Artificial Sequence
  SARM1 targeting guide sequence portion
ugcccgagcgcuccaccucgc

SEQ ID NO: 5520 - RNA, 21 nt, Artificial Sequence
  SARM1 targeting guide sequence portion
ugccgccgcacggaccccgcg

SEQ ID NO: 5521 - RNA, 21 nt, Artificial Sequence
  SARM1 targeting guide sequence portion
ugccguugcucgacucuaacc

SEQ ID NO: 5522 - RNA, 21 nt, Artificial Sequence
  SARM1 targeting guide sequence portion
ugccucgcaguagcgguguug

SEQ ID NO: 5523 - RNA, 21 nt, Artificial Sequence
  SARM1 targeting guide sequence portion
ugccugccacgcuccgcgcca

SEQ ID NO: 5524 - RNA, 21 nt, Artificial Sequence
  SARM1 targeting guide sequence portion
ugccuugcaggcucuugaugg

SEQ ID NO: 5525 - RNA, 21 nt, Artificial Sequence
  SARM1 targeting guide sequence portion
ugcgaggcaggcgugcagccg

SEQ ID NO: 5526 - RNA, 21 nt, Artificial Sequence
  SARM1 targeting guide sequence portion
ugcgccacugcgcgcuggcgc

SEQ ID NO: 5527 - RNA, 21 nt, Artificial Sequence
  SARM1 targeting guide sequence portion
ugcgccgaggcugccaucaag

SEQ ID NO: 5528 - RNA, 21 nt, Artificial Sequence
  SARM1 targeting guide sequence portion
ugcgccuccaagcgguuagag

SEQ ID NO: 5529 - RNA, 21 nt, Artificial Sequence
  SARM1 targeting guide sequence portion
ugcgcgcugcacgggggccag

SEQ ID NO: 5530 - RNA, 21 nt, Artificial Sequence
  SARM1 targeting guide sequence portion
ugcgcgcuggcgcugggcaac

SEQ ID NO: 5531 - RNA, 21 nt, Artificial Sequence
  SARM1 targeting guide sequence portion
ugcgcgcuucucuaccaugcg

SEQ ID NO: 5532 - RNA, 21 nt, Artificial Sequence
  SARM1 targeting guide sequence portion
ugcggcggcaccaauacagca

SEQ ID NO: 5533 - RNA, 21 nt, Artificial Sequence
  SARM1 targeting guide sequence portion
ugcgucgcugcaccgccuggc

SEQ ID NO: 5534 - RNA, 21 nt, Artificial Sequence
  SARM1 targeting guide sequence portion
ugcuccaagaugccugccacg

SEQ ID NO: 5535 - RNA, 21 nt, Artificial Sequence
  SARM1 targeting guide sequence portion
ugcucgacucuaaccgcuugg

SEQ ID NO: 5536 - RNA, 21 nt, Artificial Sequence
  SARM1 targeting guide sequence portion
ugcugcgccacugcgcgcugg

SEQ ID NO: 5537 - RNA, 21 nt, Artificial Sequence
  SARM1 targeting guide sequence portion
ugcuguauuggugccgccgca

SEQ ID NO: 5538 - RNA, 21 nt, Artificial Sequence
  SARM1 targeting guide sequence portion
ugcuucggcugcacgccugcc

SEQ ID NO: 5539 - RNA, 21 nt, Artificial Sequence
  SARM1 targeting guide sequence portion
ugcuugaacaugugcuccaag

SEQ ID NO: 5540 - RNA, 21 nt, Artificial Sequence
  SARM1 targeting guide sequence portion
uggacccuggccgcuucgccc

SEQ ID NO: 5541 - RNA, 21 nt, Artificial Sequence
  SARM1 targeting guide sequence portion
uggacgccagcgacacaagcc

SEQ ID NO: 5542 - RNA, 21 nt, Artificial Sequence
  SARM1 targeting guide sequence portion
uggacgcggugcuguauuggu

SEQ ID NO: 5543 - RNA, 21 nt, Artificial Sequence
  SARM1 targeting guide sequence portion
uggagaaggcgagcgggaaga

SEQ ID NO: 5544 - RNA, 21 nt, Artificial Sequence
  SARM1 targeting guide sequence portion
uggagcacauguucaagcauu

SEQ ID NO: 5545 - RNA, 21 nt, Artificial Sequence
  SARM1 targeting guide sequence portion
uggagccgcuuguggccucgc

SEQ ID NO: 5546 - RNA, 21 nt, Artificial Sequence
  SARM1 targeting guide sequence portion
uggagcgcgagguggagcgcu

SEQ ID NO: 5547 - RNA, 21 nt, Artificial Sequence
  SARM1 targeting guide sequence portion
uggagcgcucgggcacgcugg

SEQ ID NO: 5548 - RNA, 21 nt, Artificial Sequence
  SARM1 targeting guide sequence portion
uggaggcgcagugcaucgggg

SEQ ID NO: 5549 - RNA, 21 nt, Artificial Sequence
  SARM1 targeting guide sequence portion
uggcagccucggcgcagaggu

SEQ ID NO: 5550 - RNA, 21 nt, Artificial Sequence
  SARM1 targeting guide sequence portion
uggcaggcaucuuggagcaca

SEQ ID NO: 5551 - RNA, 21 nt, Artificial Sequence
  SARM1 targeting guide sequence portion
uggcaugucuccuccgaaugc

SEQ ID NO: 5552 - RNA, 21 nt, Artificial Sequence
  SARM1 targeting guide sequence portion
uggcccccgugcagcgcgcag

SEQ ID NO: 5553 - RNA, 21 nt, Artificial Sequence
  SARM1 targeting guide sequence portion
uggccgcuucgcccgcugucu

SEQ ID NO: 5554 - RNA, 21 nt, Artificial Sequence
  SARM1 targeting guide sequence portion
uggccucgcuggacccuggcc

SEQ ID NO: 5555 - RNA, 21 nt, Artificial Sequence
  SARM1 targeting guide sequence portion
uggcgaaggaacgcgaacccg

SEQ ID NO: 5556 - RNA, 21 nt, Artificial Sequence
  SARM1 targeting guide sequence portion
uggcgacuaacaaggaggugg

SEQ ID NO: 5557 - RNA, 21 nt, Artificial Sequence
  SARM1 targeting guide sequence portion
uggcgcagcagcgcggggucc

SEQ ID NO: 5558 - RNA, 21 nt, Artificial Sequence
  SARM1 targeting guide sequence portion
uggcgcgcauugggcugggcg

SEQ ID NO: 5559 - RNA, 21 nt, Artificial Sequence
  SARM1 targeting guide sequence portion
uggcgcggagcguggcaggca

SEQ ID NO: 5560 - RNA, 21 nt, Artificial Sequence
  SARM1 targeting guide sequence portion
uggcgcucguggagccgcuug

SEQ ID NO: 5561 - RNA, 21 nt, Artificial Sequence
  SARM1 targeting guide sequence portion
uggcgcugggcaacugcgcgc

SEQ ID NO: 5562 - RNA, 21 nt, Artificial Sequence
  SARM1 targeting guide sequence portion
uggcguccaccagacagcggg

SEQ ID NO: 5563 - RNA, 21 nt, Artificial Sequence
  SARM1 targeting guide sequence portion
uggcucuucccgcucgccuuc

SEQ ID NO: 5564 - RNA, 21 nt, Artificial Sequence
  SARM1 targeting guide sequence portion
uggcuugugucgcuggcgucc

SEQ ID NO: 5565 - RNA, 21 nt, Artificial Sequence
  SARM1 targeting guide sequence portion
ugggcaacugcgcgcugcacg

SEQ ID NO: 5566 - RNA, 21 nt, Artificial Sequence
  SARM1 targeting guide sequence portion
ugggcagagaccgcguggcgc

SEQ ID NO: 5567 - RNA, 21 nt, Artificial Sequence
  SARM1 targeting guide sequence portion
ugggcgugauccugaaccugg

SEQ ID NO: 5568 - RNA, 21 nt, Artificial Sequence
  SARM1 targeting guide sequence portion
ugggcugggcgugauccugaa

SEQ ID NO: 5569 - RNA, 21 nt, Artificial Sequence
  SARM1 targeting guide sequence portion
ugguagagaagcgcgcagccg

SEQ ID NO: 5570 - RNA, 21 nt, Artificial Sequence
  SARM1 targeting guide sequence portion
uggucuugccuugcaggcucu

SEQ ID NO: 5571 - RNA, 21 nt, Artificial Sequence
  SARM1 targeting guide sequence portion
uggugccgccgcacggacccc

SEQ ID NO: 5572 - RNA, 21 nt, Artificial Sequence
  SARM1 targeting guide sequence portion
ugguggacgccagcgacacaa

SEQ ID NO: 5573 - RNA, 21 nt, Artificial Sequence
  SARM1 targeting guide sequence portion
uguauuggugccgccgcacgg

SEQ ID NO: 5574 - RNA, 21 nt, Artificial Sequence
  SARM1 targeting guide sequence portion
ugucgcuggcguccaccagac

SEQ ID NO: 5575 - RNA, 21 nt, Artificial Sequence
  SARM1 targeting guide sequence portion
ugucuccuccgaaugcuugaa

SEQ ID NO: 5576 - RNA, 21 nt, Artificial Sequence
  SARM1 targeting guide sequence portion
ugucugguggacgccagcgac

SEQ ID NO: 5577 - RNA, 21 nt, Artificial Sequence
  SARM1 targeting guide sequence portion
ugugcuccaagaugccugcca

SEQ ID NO: 5578 - RNA, 21 nt, Artificial Sequence
  SARM1 targeting guide sequence portion
uguggccucgcuggacccugg

SEQ ID NO: 5579 - RNA, 21 nt, Artificial Sequence
  SARM1 targeting guide sequence portion
ugugucgcuggcguccaccag

SEQ ID NO: 5580 - RNA, 21 nt, Artificial Sequence
  SARM1 targeting guide sequence portion
uguuagucgccaacaccgcua

SEQ ID NO: 5581 - RNA, 21 nt, Artificial Sequence
  SARM1 targeting guide sequence portion
uguucaagcauucggaggaga

SEQ ID NO: 5582 - RNA, 21 nt, Artificial Sequence
  SARM1 targeting guide sequence portion
uguuggcgacuaacaaggagg

SEQ ID NO: 5583 - RNA, 21 nt, Artificial Sequence
  SARM1 targeting guide sequence portion
uuagagucgagcaacggcacg

SEQ ID NO: 5584 - RNA, 21 nt, Artificial Sequence
  SARM1 targeting guide sequence portion
uuagucgccaacaccgcuacu

SEQ ID NO: 5585 - RNA, 21 nt, Artificial Sequence
  SARM1 targeting guide sequence portion
uucaagcauucggaggagaca

SEQ ID NO: 5586 - RNA, 21 nt, Artificial Sequence
  SARM1 targeting guide sequence portion
uucaggaucacgcccagccca

SEQ ID NO: 5587 - RNA, 21 nt, Artificial Sequence
  SARM1 targeting guide sequence portion
uucccgcucgccuucuccaag

SEQ ID NO: 5588 - RNA, 21 nt, Artificial Sequence
  SARM1 targeting guide sequence portion
uuccuucgccagguucaggau

SEQ ID NO: 5589 - RNA, 21 nt, Artificial Sequence
  SARM1 targeting guide sequence portion
uucgccagguucaggaucacg

SEQ ID NO: 5590 - RNA, 21 nt, Artificial Sequence
  SARM1 targeting guide sequence portion
uucgcccgcugucugguggac

SEQ ID NO: 5591 - RNA, 21 nt, Artificial Sequence
  SARM1 targeting guide sequence portion
uucgcguuccuucgccagguu

SEQ ID NO: 5592 - RNA, 21 nt, Artificial Sequence
  SARM1 targeting guide sequence portion
uucggaggagacaugccagag

SEQ ID NO: 5593 - RNA, 21 nt, Artificial Sequence
  SARM1 targeting guide sequence portion
uucggcugcacgccugccucg

SEQ ID NO: 5594 - RNA, 21 nt, Artificial Sequence
  SARM1 targeting guide sequence portion
uucuaccucugcgccgaggcu

SEQ ID NO: 5595 - RNA, 21 nt, Artificial Sequence
  SARM1 targeting guide sequence portion
uucuccaaggaggacgagcug

SEQ ID NO: 5596 - RNA, 21 nt, Artificial Sequence
  SARM1 targeting guide sequence portion
uucucuaccaugcgucgcugc

SEQ ID NO: 5597 - RNA, 21 nt, Artificial Sequence
  SARM1 targeting guide sequence portion
uugaacaugugcuccaagaug

SEQ ID NO: 5598 - RNA, 21 nt, Artificial Sequence
  SARM1 targeting guide sequence portion
uugauggcagccucggcgcag

SEQ ID NO: 5599 - RNA, 21 nt, Artificial Sequence
  SARM1 targeting guide sequence portion
uugcaggcucuugauggcagc

SEQ ID NO: 5600 - RNA, 21 nt, Artificial Sequence
  SARM1 targeting guide sequence portion
uugcccagcgccagcgcgcag

SEQ ID NO: 5601 - RNA, 21 nt, Artificial Sequence
  SARM1 targeting guide sequence portion
uugccuugcaggcucuugaug

SEQ ID NO: 5602 - RNA, 21 nt, Artificial Sequence
  SARM1 targeting guide sequence portion
uugcucgacucuaaccgcuug

SEQ ID NO: 5603 - RNA, 21 nt, Artificial Sequence
  SARM1 targeting guide sequence portion
uuggagaaggcgagcgggaag

SEQ ID NO: 5604 - RNA, 21 nt, Artificial Sequence
  SARM1 targeting guide sequence portion
uuggagcacauguucaagcau

SEQ ID NO: 5605 - RNA, 21 nt, Artificial Sequence
  SARM1 targeting guide sequence portion
uuggaggcgcagugcaucggg

SEQ ID NO: 5606 - RNA, 21 nt, Artificial Sequence
  SARM1 targeting guide sequence portion
uuggcgacuaacaaggaggug

SEQ ID NO: 5607 - RNA, 21 nt, Artificial Sequence
  SARM1 targeting guide sequence portion
uugggcugggcgugauccuga

SEQ ID NO: 5608 - RNA, 21 nt, Artificial Sequence
  SARM1 targeting guide sequence portion
uuggucuugccuugcaggcuc

SEQ ID NO: 5609 - RNA, 21 nt, Artificial Sequence
  SARM1 targeting guide sequence portion
uuggugccgccgcacggaccc

SEQ ID NO: 5610 - RNA, 21 nt, Artificial Sequence
  SARM1 targeting guide sequence portion
uuguggccucgcuggacccug

SEQ ID NO: 5611 - RNA, 21 nt, Artificial Sequence
  SARM1 targeting guide sequence portion
uugugucgcuggcguccacca

SEQ ID NO: 5612 - RNA, 21 nt, Artificial Sequence
  SARM1 targeting guide sequence portion
uuguuagucgccaacaccgcu

SEQ ID NO: 5613 - RNA, 21 nt, Artificial Sequence
  SARM1 targeting guide sequence portion
uuucuaccucugcgccgaggc

SEQ ID NO: 5614 - RNA, 22 nt, Artificial Sequence
  SARM1 targeting guide sequence portion
aaagccccgaugcacugcgccu

SEQ ID NO: 5615 - RNA, 22 nt, Artificial Sequence
  SARM1 targeting guide sequence portion
aacaaggagguggagcgcgagg

SEQ ID NO: 5616 - RNA, 22 nt, Artificial Sequence
  SARM1 targeting guide sequence portion
aacaccgcuacugcgaggcagg

SEQ ID NO: 5617 - RNA, 22 nt, Artificial Sequence
  SARM1 targeting guide sequence portion
aacaugugcuccaagaugccug

SEQ ID NO: 5618 - RNA, 22 nt, Artificial Sequence
  SARM1 targeting guide sequence portion
aacccguagagcuggcgcggag

SEQ ID NO: 5619 - RNA, 22 nt, Artificial Sequence
  SARM1 targeting guide sequence portion
aaccgcuuggaggcgcagugca

SEQ ID NO: 5620 - RNA, 22 nt, Artificial Sequence
  SARM1 targeting guide sequence portion
aaccuggcgaaggaacgcgaac

SEQ ID NO: 5621 - RNA, 22 nt, Artificial Sequence
  SARM1 targeting guide sequence portion
aacgcgaacccguagagcuggc

SEQ ID NO: 5622 - RNA, 22 nt, Artificial Sequence
  SARM1 targeting guide sequence portion
aacggcacgaggcgcugcaggu

SEQ ID NO: 5623 - RNA, 22 nt, Artificial Sequence
  SARM1 targeting guide sequence portion
aacugcgcgcugcacgggggcc

SEQ ID NO: 5624 - RNA, 22 nt, Artificial Sequence
  SARM1 targeting guide sequence portion
aagagccacucggcugcgcgcu

SEQ ID NO: 5625 - RNA, 22 nt, Artificial Sequence
  SARM1 targeting guide sequence portion
aagagccugcaaggcaagacca

SEQ ID NO: 5626 - RNA, 22 nt, Artificial Sequence
  SARM1 targeting guide sequence portion
aagaugccugccacgcuccgcg

SEQ ID NO: 5627 - RNA, 22 nt, Artificial Sequence
  SARM1 targeting guide sequence portion
aagcagcucguccuccuuggag

SEQ ID NO: 5628 - RNA, 22 nt, Artificial Sequence
  SARM1 targeting guide sequence portion
aagcauucggaggagacaugcc

SEQ ID NO: 5629 - RNA, 22 nt, Artificial Sequence
  SARM1 targeting guide sequence portion
aagccagggccgcgggcccgac

SEQ ID NO: 5630 - RNA, 22 nt, Artificial Sequence
  SARM1 targeting guide sequence portion
aagccccgaugcacugcgccuc

SEQ ID NO: 5631 - RNA, 22 nt, Artificial Sequence
  SARM1 targeting guide sequence portion
aagcgcgcagccgaguggcucu

SEQ ID NO: 5632 - RNA, 22 nt, Artificial Sequence
  SARM1 targeting guide sequence portion
aagcggccaggguccagcgagg

SEQ ID NO: 5633 - RNA, 22 nt, Artificial Sequence
  SARM1 targeting guide sequence portion
aagcggcuccacgagcgccagc

SEQ ID NO: 5634 - RNA, 22 nt, Artificial Sequence
  SARM1 targeting guide sequence portion
aagcgguuagagucgagcaacg

SEQ ID NO: 5635 - RNA, 22 nt, Artificial Sequence
  SARM1 targeting guide sequence portion
aaggaacgcgaacccguagagc

SEQ ID NO: 5636 - RNA, 22 nt, Artificial Sequence
  SARM1 targeting guide sequence portion
aaggaggacgagcugcuucggc

SEQ ID NO: 5637 - RNA, 22 nt, Artificial Sequence
  SARM1 targeting guide sequence portion
aaggagguggagcgcgaggugg

SEQ ID NO: 5638 - RNA, 22 nt, Artificial Sequence
  SARM1 targeting guide sequence portion
aaggcgagcgggaagagccacu

SEQ ID NO: 5639 - RNA, 22 nt, Artificial Sequence
  SARM1 targeting guide sequence portion
aauacagcaccgcguccaggcc

SEQ ID NO: 5640 - RNA, 22 nt, Artificial Sequence
  SARM1 targeting guide sequence portion
aaugcuugaacaugugcuccaa

SEQ ID NO: 5641 - RNA, 22 nt, Artificial Sequence
  SARM1 targeting guide sequence portion
acaagccagggccgcgggcccg

SEQ ID NO: 5642 - RNA, 22 nt, Artificial Sequence
  SARM1 targeting guide sequence portion
acaagcggcuccacgagcgcca

SEQ ID NO: 5643 - RNA, 22 nt, Artificial Sequence
  SARM1 targeting guide sequence portion
acaaggagguggagcgcgaggu

SEQ ID NO: 5644 - RNA, 22 nt, Artificial Sequence
  SARM1 targeting guide sequence portion
acacaagccagggccgcgggcc

SEQ ID NO: 5645 - RNA, 22 nt, Artificial Sequence
  SARM1 targeting guide sequence portion
acaccgcuacugcgaggcaggc

SEQ ID NO: 5646 - RNA, 22 nt, Artificial Sequence
  SARM1 targeting guide sequence portion
acagcaccgcguccaggccgcc

SEQ ID NO: 5647 - RNA, 22 nt, Artificial Sequence
  SARM1 targeting guide sequence portion
acagcgggcgaagcggccaggg

SEQ ID NO: 5648 - RNA, 22 nt, Artificial Sequence
  SARM1 targeting guide sequence portion
acaugccagaggcugguggcgg

SEQ ID NO: 5649 - RNA, 22 nt, Artificial Sequence
  SARM1 targeting guide sequence portion
acaugugcuccaagaugccugc

SEQ ID NO: 5650 - RNA, 22 nt, Artificial Sequence
  SARM1 targeting guide sequence portion
acauguucaagcauucggagga

SEQ ID NO: 5651 - RNA, 22 nt, Artificial Sequence
  SARM1 targeting guide sequence portion
accaauacagcaccgcguccag

SEQ ID NO: 5652 - RNA, 22 nt, Artificial Sequence
  SARM1 targeting guide sequence portion
accagacagcgggcgaagcggc

SEQ ID NO: 5653 - RNA, 22 nt, Artificial Sequence
  SARM1 targeting guide sequence portion
accagccucuggcaugucuccu

SEQ ID NO: 5654 - RNA, 22 nt, Artificial Sequence
  SARM1 targeting guide sequence portion
accaugcgucgcugcaccgccu

SEQ ID NO: 5655 - RNA, 22 nt, Artificial Sequence
  SARM1 targeting guide sequence portion
acccaccuuggucuugccuugc

SEQ ID NO: 5656 - RNA, 22 nt, Artificial Sequence
  SARM1 targeting guide sequence portion
accccgcgcugcugcgccacug

SEQ ID NO: 5657 - RNA, 22 nt, Artificial Sequence
  SARM1 targeting guide sequence portion
acccguagagcuggcgcggagc

SEQ ID NO: 5658 - RNA, 22 nt, Artificial Sequence
  SARM1 targeting guide sequence portion
acccuggccgcuucgcccgcug

SEQ ID NO: 5659 - RNA, 22 nt, Artificial Sequence
  SARM1 targeting guide sequence portion
accgccuggcccccgugcagcg

SEQ ID NO: 5660 - RNA, 22 nt, Artificial Sequence
  SARM1 targeting guide sequence portion
accgcguccaggccgccggccg

SEQ ID NO: 5661 - RNA, 22 nt, Artificial Sequence
  SARM1 targeting guide sequence portion
accgcguggcgcgcauugggcu

SEQ ID NO: 5662 - RNA, 22 nt, Artificial Sequence
  SARM1 targeting guide sequence portion
accgcuacugcgaggcaggcgu

SEQ ID NO: 5663 - RNA, 22 nt, Artificial Sequence
  SARM1 targeting guide sequence portion
accgcuuggaggcgcagugcau

SEQ ID NO: 5664 - RNA, 22 nt, Artificial Sequence
  SARM1 targeting guide sequence portion
accuccuuguuagucgccaaca

SEQ ID NO: 5665 - RNA, 22 nt, Artificial Sequence
  SARM1 targeting guide sequence portion
accucgcgcuccaccuccuugu

SEQ ID NO: 5666 - RNA, 22 nt, Artificial Sequence
  SARM1 targeting guide sequence portion
accucugcgccgaggcugccau

SEQ ID NO: 5667 - RNA, 22 nt, Artificial Sequence
  SARM1 targeting guide sequence portion
accugcagcgccucgugccguu

SEQ ID NO: 5668 - RNA, 22 nt, Artificial Sequence
  SARM1 targeting guide sequence portion
accuggcgaaggaacgcgaacc

SEQ ID NO: 5669 - RNA, 22 nt, Artificial Sequence
  SARM1 targeting guide sequence portion
accuuggucuugccuugcaggc

SEQ ID NO: 5670 - RNA, 22 nt, Artificial Sequence
  SARM1 targeting guide sequence portion
acgaccugcagcgccucgugcc

SEQ ID NO: 5671 - RNA, 22 nt, Artificial Sequence
  SARM1 targeting guide sequence portion
acgagcgccagcgugcccgagc

SEQ ID NO: 5672 - RNA, 22 nt, Artificial Sequence
  SARM1 targeting guide sequence portion
acgagcugcuucggcugcacgc

SEQ ID NO: 5673 - RNA, 22 nt, Artificial Sequence
  SARM1 targeting guide sequence portion
acgaggcgcugcaggucgucgg

SEQ ID NO: 5674 - RNA, 22 nt, Artificial Sequence
  SARM1 targeting guide sequence portion
acgcaugguagagaagcgcgca

SEQ ID NO: 5675 - RNA, 22 nt, Artificial Sequence
  SARM1 targeting guide sequence portion
acgccagcgacacaagccaggg

SEQ ID NO: 5676 - RNA, 22 nt, Artificial Sequence
  SARM1 targeting guide sequence portion
acgcccagcccaaugcgcgcca

SEQ ID NO: 5677 - RNA, 22 nt, Artificial Sequence
  SARM1 targeting guide sequence portion
acgccugccucgcaguagcggu

SEQ ID NO: 5678 - RNA, 22 nt, Artificial Sequence
  SARM1 targeting guide sequence portion
acgcgaacccguagagcuggcg

SEQ ID NO: 5679 - RNA, 22 nt, Artificial Sequence
  SARM1 targeting guide sequence portion
acgcggugcuguauuggugccg

SEQ ID NO: 5680 - RNA, 22 nt, Artificial Sequence
  SARM1 targeting guide sequence portion
acgcuccgcgccagcucuacgg

SEQ ID NO: 5681 - RNA, 22 nt, Artificial Sequence
  SARM1 targeting guide sequence portion
acgcuggcgcucguggagccgc

SEQ ID NO: 5682 - RNA, 22 nt, Artificial Sequence
  SARM1 targeting guide sequence portion
acggaccccgcgcugcugcgcc

SEQ ID NO: 5683 - RNA, 22 nt, Artificial Sequence
  SARM1 targeting guide sequence portion
acggcacgaggcgcugcagguc

SEQ ID NO: 5684 - RNA, 22 nt, Artificial Sequence
  SARM1 targeting guide sequence portion
acgggggccaggcggugcagcg

SEQ ID NO: 5685 - RNA, 22 nt, Artificial Sequence
  SARM1 targeting guide sequence portion
acggguucgcguuccuucgcca

SEQ ID NO: 5686 - RNA, 22 nt, Artificial Sequence
  SARM1 targeting guide sequence portion
acuaacaaggagguggagcgcg

SEQ ID NO: 5687 - RNA, 22 nt, Artificial Sequence
  SARM1 targeting guide sequence portion
acucggcugcgcgcuucucuac

SEQ ID NO: 5688 - RNA, 22 nt, Artificial Sequence
  SARM1 targeting guide sequence portion
acucuaaccgcuuggaggcgca

SEQ ID NO: 5689 - RNA, 22 nt, Artificial Sequence
  SARM1 targeting guide sequence portion
acugcgaggcaggcgugcagcc

SEQ ID NO: 5690 - RNA, 22 nt, Artificial Sequence
  SARM1 targeting guide sequence portion
acugcgccuccaagcgguuaga

SEQ ID NO: 5691 - RNA, 22 nt, Artificial Sequence
  SARM1 targeting guide sequence portion
acugcgcgcugcacgggggcca

SEQ ID NO: 5692 - RNA, 22 nt, Artificial Sequence
  SARM1 targeting guide sequence portion
acugcgcgcuggcgcugggcaa

SEQ ID NO: 5693 - RNA, 22 nt, Artificial Sequence
  SARM1 targeting guide sequence portion
agaaagccccgaugcacugcgc

SEQ ID NO: 5694 - RNA, 22 nt, Artificial Sequence
  SARM1 targeting guide sequence portion
agaagcgcgcagccgaguggcu

SEQ ID NO: 5695 - RNA, 22 nt, Artificial Sequence
  SARM1 targeting guide sequence portion
agaaggcgagcgggaagagcca

SEQ ID NO: 5696 - RNA, 22 nt, Artificial Sequence
  SARM1 targeting guide sequence portion
agacagcgggcgaagcggccag

SEQ ID NO: 5697 - RNA, 22 nt, Artificial Sequence
  SARM1 targeting guide sequence portion
agacaugccagaggcugguggc

SEQ ID NO: 5698 - RNA, 22 nt, Artificial Sequence
  SARM1 targeting guide sequence portion
agaccgcguggcgcgcauuggg

SEQ ID NO: 5699 - RNA, 22 nt, Artificial Sequence
  SARM1 targeting guide sequence portion
agagaagcgcgcagccgagugg

SEQ ID NO: 5700 - RNA, 22 nt, Artificial Sequence
  SARM1 targeting guide sequence portion
agagaccgcguggcgcgcauug

SEQ ID NO: 5701 - RNA, 22 nt, Artificial Sequence
  SARM1 targeting guide sequence portion
agagccacucggcugcgcgcuu

SEQ ID NO: 5702 - RNA, 22 nt, Artificial Sequence
  SARM1 targeting guide sequence portion
agagccugcaaggcaagaccaa

SEQ ID NO: 5703 - RNA, 22 nt, Artificial Sequence
  SARM1 targeting guide sequence portion
agagcuggcgcggagcguggca

SEQ ID NO: 5704 - RNA, 22 nt, Artificial Sequence
  SARM1 targeting guide sequence portion
agaggcugguggcggccggcgg

SEQ ID NO: 5705 - RNA, 22 nt, Artificial Sequence
  SARM1 targeting guide sequence portion
agagguagaaagccccgaugca

SEQ ID NO: 5706 - RNA, 22 nt, Artificial Sequence
  SARM1 targeting guide sequence portion
agagucgagcaacggcacgagg

SEQ ID NO: 5707 - RNA, 22 nt, Artificial Sequence
  SARM1 targeting guide sequence portion
agaugccugccacgcuccgcgc

SEQ ID NO: 5708 - RNA, 22 nt, Artificial Sequence
  SARM1 targeting guide sequence portion
agcaacggcacgaggcgcugca

SEQ ID NO: 5709 - RNA, 22 nt, Artificial Sequence
  SARM1 targeting guide sequence portion
agcacauguucaagcauucgga

SEQ ID NO: 5710 - RNA, 22 nt, Artificial Sequence
  SARM1 targeting guide sequence portion
agcaccgcguccaggccgccgg

SEQ ID NO: 5711 - RNA, 22 nt, Artificial Sequence
  SARM1 targeting guide sequence portion
agcagcgcgggguccgugcggc

SEQ ID NO: 5712 - RNA, 22 nt, Artificial Sequence
  SARM1 targeting guide sequence portion
agcagcucguccuccuuggaga

SEQ ID NO: 5713 - RNA, 22 nt, Artificial Sequence
  SARM1 targeting guide sequence portion
agcauucggaggagacaugcca

SEQ ID NO: 5714 - RNA, 22 nt, Artificial Sequence
  SARM1 targeting guide sequence portion
agccacucggcugcgcgcuucu

SEQ ID NO: 5715 - RNA, 22 nt, Artificial Sequence
  SARM1 targeting guide sequence portion
agccagggccgcgggcccgacg

SEQ ID NO: 5716 - RNA, 22 nt, Artificial Sequence
  SARM1 targeting guide sequence portion
agcccaaugcgcgccacgcggu

SEQ ID NO: 5717 - RNA, 22 nt, Artificial Sequence
  SARM1 targeting guide sequence portion
agccccgaugcacugcgccucc

SEQ ID NO: 5718 - RNA, 22 nt, Artificial Sequence
  SARM1 targeting guide sequence portion
agccgaagcagcucguccuccu

SEQ ID NO: 5719 - RNA, 22 nt, Artificial Sequence
  SARM1 targeting guide sequence portion
agccgaguggcucuucccgcuc

SEQ ID NO: 5720 - RNA, 22 nt, Artificial Sequence
  SARM1 targeting guide sequence portion
agccgcuuguggccucgcugga

SEQ ID NO: 5721 - RNA, 22 nt, Artificial Sequence
  SARM1 targeting guide sequence portion
agccucggcgcagagguagaaa

SEQ ID NO: 5722 - RNA, 22 nt, Artificial Sequence
  SARM1 targeting guide sequence portion
agccucuggcaugucuccuccg

SEQ ID NO: 5723 - RNA, 22 nt, Artificial Sequence
  SARM1 targeting guide sequence portion
agccugcaaggcaagaccaagg

SEQ ID NO: 5724 - RNA, 22 nt, Artificial Sequence
  SARM1 targeting guide sequence portion
agcgacacaagccagggccgcg

SEQ ID NO: 5725 - RNA, 22 nt, Artificial Sequence
  SARM1 targeting guide sequence portion
agcgacgcaugguagagaagcg

SEQ ID NO: 5726 - RNA, 22 nt, Artificial Sequence
  SARM1 targeting guide sequence portion
agcgaggccacaagcggcucca

SEQ ID NO: 5727 - RNA, 22 nt, Artificial Sequence
  SARM1 targeting guide sequence portion
agcgccagcgcgcaguggcgca

SEQ ID NO: 5728 - RNA, 22 nt, Artificial Sequence
  SARM1 targeting guide sequence portion
agcgccagcgugcccgagcgcu

SEQ ID NO: 5729 - RNA, 22 nt, Artificial Sequence
  SARM1 targeting guide sequence portion
agcgccucgugccguugcucga

SEQ ID NO: 5730 - RNA, 22 nt, Artificial Sequence
  SARM1 targeting guide sequence portion
agcgcgagguggagcgcucggg

SEQ ID NO: 5731 - RNA, 22 nt, Artificial Sequence
  SARM1 targeting guide sequence portion
agcgcgcagccgaguggcucuu

SEQ ID NO: 5732 - RNA, 22 nt, Artificial Sequence
  SARM1 targeting guide sequence portion
agcgcgcaguggcgcagcagcg

SEQ ID NO: 5733 - RNA, 22 nt, Artificial Sequence
  SARM1 targeting guide sequence portion
agcgcgcaguugcccagcgcca

SEQ ID NO: 5734 - RNA, 22 nt, Artificial Sequence
  SARM1 targeting guide sequence portion
agcgcgggguccgugcggcggc

SEQ ID NO: 5735 - RNA, 22 nt, Artificial Sequence
  SARM1 targeting guide sequence portion
agcgcuccaccucgcgcuccac

SEQ ID NO: 5736 - RNA, 22 nt, Artificial Sequence
  SARM1 targeting guide sequence portion
agcgcucgggcacgcuggcgcu

SEQ ID NO: 5737 - RNA, 22 nt, Artificial Sequence
  SARM1 targeting guide sequence portion
agcggccaggguccagcgaggc

SEQ ID NO: 5738 - RNA, 22 nt, Artificial Sequence
  SARM1 targeting guide sequence portion
agcggcuccacgagcgccagcg

SEQ ID NO: 5739 - RNA, 22 nt, Artificial Sequence
  SARM1 targeting guide sequence portion
agcgggaagagccacucggcug

SEQ ID NO: 5740 - RNA, 22 nt, Artificial Sequence
  SARM1 targeting guide sequence portion
agcgggcgaagcggccaggguc

SEQ ID NO: 5741 - RNA, 22 nt, Artificial Sequence
  SARM1 targeting guide sequence portion
agcgguguuggcgacuaacaag

SEQ ID NO: 5742 - RNA, 22 nt, Artificial Sequence
  SARM1 targeting guide sequence portion
agcgguuagagucgagcaacgg

SEQ ID NO: 5743 - RNA, 22 nt, Artificial Sequence
  SARM1 targeting guide sequence portion
agcgugcccgagcgcuccaccu

SEQ ID NO: 5744 - RNA, 22 nt, Artificial Sequence
  SARM1 targeting guide sequence portion
agcguggcaggcaucuuggagc

SEQ ID NO: 5745 - RNA, 22 nt, Artificial Sequence
  SARM1 targeting guide sequence portion
agcucguccuccuuggagaagg

SEQ ID NO: 5746 - RNA, 22 nt, Artificial Sequence
  SARM1 targeting guide sequence portion
agcucuacggguucgcguuccu

SEQ ID NO: 5747 - RNA, 22 nt, Artificial Sequence
  SARM1 targeting guide sequence portion
agcugcuucggcugcacgccug

SEQ ID NO: 5748 - RNA, 22 nt, Artificial Sequence
  SARM1 targeting guide sequence portion
agcuggcgcggagcguggcagg

SEQ ID NO: 5749 - RNA, 22 nt, Artificial Sequence
  SARM1 targeting guide sequence portion
aggaacgcgaacccguagagcu

SEQ ID NO: 5750 - RNA, 22 nt, Artificial Sequence
  SARM1 targeting guide sequence portion
aggacgagcugcuucggcugca

SEQ ID NO: 5751 - RNA, 22 nt, Artificial Sequence
  SARM1 targeting guide sequence portion
aggagacaugccagaggcuggu

SEQ ID NO: 5752 - RNA, 22 nt, Artificial Sequence
  SARM1 targeting guide sequence portion
aggaggacgagcugcuucggcu

SEQ ID NO: 5753 - RNA, 22 nt, Artificial Sequence
  SARM1 targeting guide sequence portion
aggagguggagcgcgaggugga

SEQ ID NO: 5754 - RNA, 22 nt, Artificial Sequence
  SARM1 targeting guide sequence portion
aggaucacgcccagcccaaugc

SEQ ID NO: 5755 - RNA, 22 nt, Artificial Sequence
  SARM1 targeting guide sequence portion
aggcaggcgugcagccgaagca

SEQ ID NO: 5756 - RNA, 22 nt, Artificial Sequence
  SARM1 targeting guide sequence portion
aggcaucuuggagcacauguuc

SEQ ID NO: 5757 - RNA, 22 nt, Artificial Sequence
  SARM1 targeting guide sequence portion
aggccacaagcggcuccacgag

SEQ ID NO: 5758 - RNA, 22 nt, Artificial Sequence
  SARM1 targeting guide sequence portion
aggccgccggccgccaccagcc

SEQ ID NO: 5759 - RNA, 22 nt, Artificial Sequence
  SARM1 targeting guide sequence portion
aggcgagcgggaagagccacuc

SEQ ID NO: 5760 - RNA, 22 nt, Artificial Sequence
  SARM1 targeting guide sequence portion
aggcgcagugcaucggggcuuu

SEQ ID NO: 5761 - RNA, 22 nt, Artificial Sequence
  SARM1 targeting guide sequence portion
aggcgcugcaggucgucgggcc

SEQ ID NO: 5762 - RNA, 22 nt, Artificial Sequence
  SARM1 targeting guide sequence portion
aggcggugcagcgacgcauggu

SEQ ID NO: 5763 - RNA, 22 nt, Artificial Sequence
  SARM1 targeting guide sequence portion
aggcgugcagccgaagcagcuc

SEQ ID NO: 5764 - RNA, 22 nt, Artificial Sequence
  SARM1 targeting guide sequence portion
aggcucuugauggcagccucgg

SEQ ID NO: 5765 - RNA, 22 nt, Artificial Sequence
  SARM1 targeting guide sequence portion
aggcugccaucaagagccugca

SEQ ID NO: 5766 - RNA, 22 nt, Artificial Sequence
  SARM1 targeting guide sequence portion
aggcugguggcggccggcggcc

SEQ ID NO: 5767 - RNA, 22 nt, Artificial Sequence
  SARM1 targeting guide sequence portion
agggccgcgggcccgacgaccu

SEQ ID NO: 5768 - RNA, 22 nt, Artificial Sequence
  SARM1 targeting guide sequence portion
aggguccagcgaggccacaagc

SEQ ID NO: 5769 - RNA, 22 nt, Artificial Sequence
  SARM1 targeting guide sequence portion
agguagaaagccccgaugcacu

SEQ ID NO: 5770 - RNA, 22 nt, Artificial Sequence
  SARM1 targeting guide sequence portion
aggucgucgggcccgcggcccu

SEQ ID NO: 5771 - RNA, 22 nt, Artificial Sequence
  SARM1 targeting guide sequence portion
agguggagcgcgagguggagcg

SEQ ID NO: 5772 - RNA, 22 nt, Artificial Sequence
  SARM1 targeting guide sequence portion
agguggagcgcucgggcacgcu

SEQ ID NO: 5773 - RNA, 22 nt, Artificial Sequence
  SARM1 targeting guide sequence portion
agguucaggaucacgcccagcc

SEQ ID NO: 5774 - RNA, 22 nt, Artificial Sequence
  SARM1 targeting guide sequence portion
aguagcgguguuggcgacuaac

SEQ ID NO: 5775 - RNA, 22 nt, Artificial Sequence
  SARM1 targeting guide sequence portion
agucgagcaacggcacgaggcg

SEQ ID NO: 5776 - RNA, 22 nt, Artificial Sequence
  SARM1 targeting guide sequence portion
agucgccaacaccgcuacugcg

SEQ ID NO: 5777 - RNA, 22 nt, Artificial Sequence
  SARM1 targeting guide sequence portion
agugcaucggggcuuucuaccu

SEQ ID NO: 5778 - RNA, 22 nt, Artificial Sequence
  SARM1 targeting guide sequence portion
aguggcgcagcagcgcgggguc

SEQ ID NO: 5779 - RNA, 22 nt, Artificial Sequence
  SARM1 targeting guide sequence portion
aguggcucuucccgcucgccuu

SEQ ID NO: 5780 - RNA, 22 nt, Artificial Sequence
  SARM1 targeting guide sequence portion
aguugcccagcgccagcgcgca

SEQ ID NO: 5781 - RNA, 22 nt, Artificial Sequence
  SARM1 targeting guide sequence portion
auacagcaccgcguccaggccg

SEQ ID NO: 5782 - RNA, 22 nt, Artificial Sequence
  SARM1 targeting guide sequence portion
aucaagagccugcaaggcaaga

SEQ ID NO: 5783 - RNA, 22 nt, Artificial Sequence
  SARM1 targeting guide sequence portion
aucacgcccagcccaaugcgcg

SEQ ID NO: 5784 - RNA, 22 nt, Artificial Sequence
  SARM1 targeting guide sequence portion
auccugaaccuggcgaaggaac

SEQ ID NO: 5785 - RNA, 22 nt, Artificial Sequence
  SARM1 targeting guide sequence portion
aucggggcuuucuaccucugcg

SEQ ID NO: 5786 - RNA, 22 nt, Artificial Sequence
  SARM1 targeting guide sequence portion
aucuuggagcacauguucaagc

SEQ ID NO: 5787 - RNA, 22 nt, Artificial Sequence
  SARM1 targeting guide sequence portion
augcacugcgccuccaagcggu

SEQ ID NO: 5788 - RNA, 22 nt, Artificial Sequence
  SARM1 targeting guide sequence portion
augccagaggcugguggcggcc

SEQ ID NO: 5789 - RNA, 22 nt, Artificial Sequence
  SARM1 targeting guide sequence portion
augccugccacgcuccgcgcca

SEQ ID NO: 5790 - RNA, 22 nt, Artificial Sequence
  SARM1 targeting guide sequence portion
augcgucgcugcaccgccuggc

SEQ ID NO: 5791 - RNA, 22 nt, Artificial Sequence
  SARM1 targeting guide sequence portion
augcuugaacaugugcuccaag

SEQ ID NO: 5792 - RNA, 22 nt, Artificial Sequence
  SARM1 targeting guide sequence portion
auggcagccucggcgcagaggu

SEQ ID NO: 5793 - RNA, 22 nt, Artificial Sequence
  SARM1 targeting guide sequence portion
augguagagaagcgcgcagccg

SEQ ID NO: 5794 - RNA, 22 nt, Artificial Sequence
  SARM1 targeting guide sequence portion
augucuccuccgaaugcuugaa

SEQ ID NO: 5795 - RNA, 22 nt, Artificial Sequence
  SARM1 targeting guide sequence portion
augugcuccaagaugccugcca

SEQ ID NO: 5796 - RNA, 22 nt, Artificial Sequence
  SARM1 targeting guide sequence portion
auguucaagcauucggaggaga

SEQ ID NO: 5797 - RNA, 22 nt, Artificial Sequence
  SARM1 targeting guide sequence portion
auucggaggagacaugccagag

SEQ ID NO: 5798 - RNA, 22 nt, Artificial Sequence
  SARM1 targeting guide sequence portion
auugggcugggcgugauccuga

SEQ ID NO: 5799 - RNA, 22 nt, Artificial Sequence
  SARM1 targeting guide sequence portion
auuggugccgccgcacggaccc

SEQ ID NO: 5800 - RNA, 22 nt, Artificial Sequence
  SARM1 targeting guide sequence portion
caacaccgcuacugcgaggcag

SEQ ID NO: 5801 - RNA, 22 nt, Artificial Sequence
  SARM1 targeting guide sequence portion
caacggcacgaggcgcugcagg

SEQ ID NO: 5802 - RNA, 22 nt, Artificial Sequence
  SARM1 targeting guide sequence portion
caacugcgcgcugcacgggggc

SEQ ID NO: 5803 - RNA, 22 nt, Artificial Sequence
  SARM1 targeting guide sequence portion
caagagccugcaaggcaagacc

SEQ ID NO: 5804 - RNA, 22 nt, Artificial Sequence
  SARM1 targeting guide sequence portion
caagaugccugccacgcuccgc

SEQ ID NO: 5805 - RNA, 22 nt, Artificial Sequence
  SARM1 targeting guide sequence portion
caagcauucggaggagacaugc

SEQ ID NO: 5806 - RNA, 22 nt, Artificial Sequence
  SARM1 targeting guide sequence portion
caagccagggccgcgggcccga

SEQ ID NO: 5807 - RNA, 22 nt, Artificial Sequence
  SARM1 targeting guide sequence portion
caagcggcuccacgagcgccag

SEQ ID NO: 5808 - RNA, 22 nt, Artificial Sequence
  SARM1 targeting guide sequence portion
caagcgguuagagucgagcaac

SEQ ID NO: 5809 - RNA, 22 nt, Artificial Sequence
  SARM1 targeting guide sequence portion
caaggaggacgagcugcuucgg

SEQ ID NO: 5810 - RNA, 22 nt, Artificial Sequence
  SARM1 targeting guide sequence portion
caaggagguggagcgcgaggug

SEQ ID NO: 5811 - RNA, 22 nt, Artificial Sequence
  SARM1 targeting guide sequence portion
caauacagcaccgcguccaggc

SEQ ID NO: 5812 - RNA, 22 nt, Artificial Sequence
  SARM1 targeting guide sequence portion
cacaagccagggccgcgggccc

SEQ ID NO: 5813 - RNA, 22 nt, Artificial Sequence
  SARM1 targeting guide sequence portion
cacaagcggcuccacgagcgcc

SEQ ID NO: 5814 - RNA, 22 nt, Artificial Sequence
  SARM1 targeting guide sequence portion
cacauguucaagcauucggagg

SEQ ID NO: 5815 - RNA, 22 nt, Artificial Sequence
  SARM1 targeting guide sequence portion
caccaauacagcaccgcgucca

SEQ ID NO: 5816 - RNA, 22 nt, Artificial Sequence
  SARM1 targeting guide sequence portion
caccagacagcgggcgaagcgg

SEQ ID NO: 5817 - RNA, 22 nt, Artificial Sequence
  SARM1 targeting guide sequence portion
caccagccucuggcaugucucc

SEQ ID NO: 5818 - RNA, 22 nt, Artificial Sequence
  SARM1 targeting guide sequence portion
cacccaccuuggucuugccuug

SEQ ID NO: 5819 - RNA, 22 nt, Artificial Sequence
  SARM1 targeting guide sequence portion
caccgccuggcccccgugcagc

SEQ ID NO: 5820 - RNA, 22 nt, Artificial Sequence
  SARM1 targeting guide sequence portion
caccgcuacugcgaggcaggcg

SEQ ID NO: 5821 - RNA, 22 nt, Artificial Sequence
  SARM1 targeting guide sequence portion
caccuccuuguuagucgccaac

SEQ ID NO: 5822 - RNA, 22 nt, Artificial Sequence
  SARM1 targeting guide sequence portion
caccucgcgcuccaccuccuug

SEQ ID NO: 5823 - RNA, 22 nt, Artificial Sequence
  SARM1 targeting guide sequence portion
caccuuggucuugccuugcagg

SEQ ID NO: 5824 - RNA, 22 nt, Artificial Sequence
  SARM1 targeting guide sequence portion
cacgagcgccagcgugcccgag

SEQ ID NO: 5825 - RNA, 22 nt, Artificial Sequence
  SARM1 targeting guide sequence portion
cacgaggcgcugcaggucgucg

SEQ ID NO: 5826 - RNA, 22 nt, Artificial Sequence
  SARM1 targeting guide sequence portion
cacgcccagcccaaugcgcgcc

SEQ ID NO: 5827 - RNA, 22 nt, Artificial Sequence
  SARM1 targeting guide sequence portion
cacgccugccucgcaguagcgg

SEQ ID NO: 5828 - RNA, 22 nt, Artificial Sequence
  SARM1 targeting guide sequence portion
cacgcuccgcgccagcucuacg

SEQ ID NO: 5829 - RNA, 22 nt, Artificial Sequence
  SARM1 targeting guide sequence portion
cacgcuggcgcucguggagccg

SEQ ID NO: 5830 - RNA, 22 nt, Artificial Sequence
  SARM1 targeting guide sequence portion
cacggaccccgcgcugcugcgc

SEQ ID NO: 5831 - RNA, 22 nt, Artificial Sequence
  SARM1 targeting guide sequence portion
cacgggggccaggcggugcagc

SEQ ID NO: 5832 - RNA, 22 nt, Artificial Sequence
  SARM1 targeting guide sequence portion
cacucggcugcgcgcuucucua

SEQ ID NO: 5833 - RNA, 22 nt, Artificial Sequence
  SARM1 targeting guide sequence portion
cacugcgccuccaagcgguuag

SEQ ID NO: 5834 - RNA, 22 nt, Artificial Sequence
  SARM1 targeting guide sequence portion
cacugcgcgcuggcgcugggca

SEQ ID NO: 5835 - RNA, 22 nt, Artificial Sequence
  SARM1 targeting guide sequence portion
cagacagcgggcgaagcggcca

SEQ ID NO: 5836 - RNA, 22 nt, Artificial Sequence
  SARM1 targeting guide sequence portion
cagagaccgcguggcgcgcauu

SEQ ID NO: 5837 - RNA, 22 nt, Artificial Sequence
  SARM1 targeting guide sequence portion
cagaggcugguggcggccggcg

SEQ ID NO: 5838 - RNA, 22 nt, Artificial Sequence
  SARM1 targeting guide sequence portion
cagagguagaaagccccgaugc

SEQ ID NO: 5839 - RNA, 22 nt, Artificial Sequence
  SARM1 targeting guide sequence portion
cagcagcgcgggguccgugcgg

SEQ ID NO: 5840 - RNA, 22 nt, Artificial Sequence
  SARM1 targeting guide sequence portion
cagcccaaugcgcgccacgcgg

SEQ ID NO: 5841 - RNA, 22 nt, Artificial Sequence
  SARM1 targeting guide sequence portion
cagccgaagcagcucguccucc

SEQ ID NO: 5842 - RNA, 22 nt, Artificial Sequence
  SARM1 targeting guide sequence portion
cagccgaguggcucuucccgcu

SEQ ID NO: 5843 - RNA, 22 nt, Artificial Sequence
  SARM1 targeting guide sequence portion
cagccucggcgcagagguagaa

SEQ ID NO: 5844 - RNA, 22 nt, Artificial Sequence
  SARM1 targeting guide sequence portion
cagccucuggcaugucuccucc

SEQ ID NO: 5845 - RNA, 22 nt, Artificial Sequence
  SARM1 targeting guide sequence portion
cagcgacacaagccagggccgc

SEQ ID NO: 5846 - RNA, 22 nt, Artificial Sequence
  SARM1 targeting guide sequence portion
cagcgacgcaugguagagaagc

SEQ ID NO: 5847 - RNA, 22 nt, Artificial Sequence
  SARM1 targeting guide sequence portion
cagcgaggccacaagcggcucc

SEQ ID NO: 5848 - RNA, 22 nt, Artificial Sequence
  SARM1 targeting guide sequence portion
cagcgccagcgcgcaguggcgc

SEQ ID NO: 5849 - RNA, 22 nt, Artificial Sequence
  SARM1 targeting guide sequence portion
cagcgccucgugccguugcucg

SEQ ID NO: 5850 - RNA, 22 nt, Artificial Sequence
  SARM1 targeting guide sequence portion
cagcgcgcaguggcgcagcagc

SEQ ID NO: 5851 - RNA, 22 nt, Artificial Sequence
  SARM1 targeting guide sequence portion
cagcgcgcaguugcccagcgcc

SEQ ID NO: 5852 - RNA, 22 nt, Artificial Sequence
  SARM1 targeting guide sequence portion
cagcgcgggguccgugcggcgg

SEQ ID NO: 5853 - RNA, 22 nt, Artificial Sequence
  SARM1 targeting guide sequence portion
cagcgggcgaagcggccagggu

SEQ ID NO: 5854 - RNA, 22 nt, Artificial Sequence
  SARM1 targeting guide sequence portion
cagcgugcccgagcgcuccacc

SEQ ID NO: 5855 - RNA, 22 nt, Artificial Sequence
  SARM1 targeting guide sequence portion
cagcucguccuccuuggagaag

SEQ ID NO: 5856 - RNA, 22 nt, Artificial Sequence
  SARM1 targeting guide sequence portion
cagcucuacggguucgcguucc

SEQ ID NO: 5857 - RNA, 22 nt, Artificial Sequence
  SARM1 targeting guide sequence portion
caggaucacgcccagcccaaug

SEQ ID NO: 5858 - RNA, 22 nt, Artificial Sequence
  SARM1 targeting guide sequence portion
caggcaucuuggagcacauguu

SEQ ID NO: 5859 - RNA, 22 nt, Artificial Sequence
  SARM1 targeting guide sequence portion
caggccgccggccgccaccagc

SEQ ID NO: 5860 - RNA, 22 nt, Artificial Sequence
  SARM1 targeting guide sequence portion
caggcggugcagcgacgcaugg

SEQ ID NO: 5861 - RNA, 22 nt, Artificial Sequence
  SARM1 targeting guide sequence portion
caggcgugcagccgaagcagcu

SEQ ID NO: 5862 - RNA, 22 nt, Artificial Sequence
  SARM1 targeting guide sequence portion
caggcucuugauggcagccucg

SEQ ID NO: 5863 - RNA, 22 nt, Artificial Sequence
  SARM1 targeting guide sequence portion
cagggccgcgggcccgacgacc

SEQ ID NO: 5864 - RNA, 22 nt, Artificial Sequence
  SARM1 targeting guide sequence portion
caggguccagcgaggccacaag

SEQ ID NO: 5865 - RNA, 22 nt, Artificial Sequence
  SARM1 targeting guide sequence portion
caggucgucgggcccgcggccc

SEQ ID NO: 5866 - RNA, 22 nt, Artificial Sequence
  SARM1 targeting guide sequence portion
cagguucaggaucacgcccagc

SEQ ID NO: 5867 - RNA, 22 nt, Artificial Sequence
  SARM1 targeting guide sequence portion
caguagcgguguuggcgacuaa

SEQ ID NO: 5868 - RNA, 22 nt, Artificial Sequence
  SARM1 targeting guide sequence portion
cagugcaucggggcuuucuacc

SEQ ID NO: 5869 - RNA, 22 nt, Artificial Sequence
  SARM1 targeting guide sequence portion
caguggcgcagcagcgcggggu

SEQ ID NO: 5870 - RNA, 22 nt, Artificial Sequence
  SARM1 targeting guide sequence portion
caguugcccagcgccagcgcgc

SEQ ID NO: 5871 - RNA, 22 nt, Artificial Sequence
  SARM1 targeting guide sequence portion
caucaagagccugcaaggcaag

SEQ ID NO: 5872 - RNA, 22 nt, Artificial Sequence
  SARM1 targeting guide sequence portion
caucggggcuuucuaccucugc

SEQ ID NO: 5873 - RNA, 22 nt, Artificial Sequence
  SARM1 targeting guide sequence portion
caucuuggagcacauguucaag

SEQ ID NO: 5874 - RNA, 22 nt, Artificial Sequence
  SARM1 targeting guide sequence portion
caugccagaggcugguggcggc

SEQ ID NO: 5875 - RNA, 22 nt, Artificial Sequence
  SARM1 targeting guide sequence portion
caugcgucgcugcaccgccugg

SEQ ID NO: 5876 - RNA, 22 nt, Artificial Sequence
  SARM1 targeting guide sequence portion
caugguagagaagcgcgcagcc

SEQ ID NO: 5877 - RNA, 22 nt, Artificial Sequence
  SARM1 targeting guide sequence portion
caugucuccuccgaaugcuuga

SEQ ID NO: 5878 - RNA, 22 nt, Artificial Sequence
  SARM1 targeting guide sequence portion
caugugcuccaagaugccugcc

SEQ ID NO: 5879 - RNA, 22 nt, Artificial Sequence
  SARM1 targeting guide sequence portion
cauguucaagcauucggaggag

SEQ ID NO: 5880 - RNA, 22 nt, Artificial Sequence
  SARM1 targeting guide sequence portion
cauucggaggagacaugccaga

SEQ ID NO: 5881 - RNA, 22 nt, Artificial Sequence
  SARM1 targeting guide sequence portion
cauugggcugggcgugauccug

SEQ ID NO: 5882 - RNA, 22 nt, Artificial Sequence
  SARM1 targeting guide sequence portion
ccaacaccgcuacugcgaggca

SEQ ID NO: 5883 - RNA, 22 nt, Artificial Sequence
  SARM1 targeting guide sequence portion
ccaagaugccugccacgcuccg

SEQ ID NO: 5884 - RNA, 22 nt, Artificial Sequence
  SARM1 targeting guide sequence portion
ccaagcgguuagagucgagcaa

SEQ ID NO: 5885 - RNA, 22 nt, Artificial Sequence
  SARM1 targeting guide sequence portion
ccaaggaggacgagcugcuucg

SEQ ID NO: 5886 - RNA, 22 nt, Artificial Sequence
  SARM1 targeting guide sequence portion
ccaauacagcaccgcguccagg

SEQ ID NO: 5887 - RNA, 22 nt, Artificial Sequence
  SARM1 targeting guide sequence portion
ccaaugcgcgccacgcggucuc

SEQ ID NO: 5888 - RNA, 22 nt, Artificial Sequence
  SARM1 targeting guide sequence portion
ccacaagcggcuccacgagcgc

SEQ ID NO: 5889 - RNA, 22 nt, Artificial Sequence
  SARM1 targeting guide sequence portion
ccaccagacagcgggcgaagcg

SEQ ID NO: 5890 - RNA, 22 nt, Artificial Sequence
  SARM1 targeting guide sequence portion
ccaccagccucuggcaugucuc

SEQ ID NO: 5891 - RNA, 22 nt, Artificial Sequence
  SARM1 targeting guide sequence portion
ccaccuccuuguuagucgccaa

SEQ ID NO: 5892 - RNA, 22 nt, Artificial Sequence
  SARM1 targeting guide sequence portion
ccaccucgcgcuccaccuccuu

SEQ ID NO: 5893 - RNA, 22 nt, Artificial Sequence
  SARM1 targeting guide sequence portion
ccaccuuggucuugccuugcag

SEQ ID NO: 5894 - RNA, 22 nt, Artificial Sequence
  SARM1 targeting guide sequence portion
ccacgagcgccagcgugcccga

SEQ ID NO: 5895 - RNA, 22 nt, Artificial Sequence
  SARM1 targeting guide sequence portion
ccacgcuccgcgccagcucuac

SEQ ID NO: 5896 - RNA, 22 nt, Artificial Sequence
  SARM1 targeting guide sequence portion
ccacucggcugcgcgcuucucu

SEQ ID NO: 5897 - RNA, 22 nt, Artificial Sequence
  SARM1 targeting guide sequence portion
ccacugcgcgcuggcgcugggc

SEQ ID NO: 5898 - RNA, 22 nt, Artificial Sequence
  SARM1 targeting guide sequence portion
ccagacagcgggcgaagcggcc

SEQ ID NO: 5899 - RNA, 22 nt, Artificial Sequence
  SARM1 targeting guide sequence portion
ccagaggcugguggcggccggc

SEQ ID NO: 5900 - RNA, 22 nt, Artificial Sequence
  SARM1 targeting guide sequence portion
ccagcccaaugcgcgccacgcg

SEQ ID NO: 5901 - RNA, 22 nt, Artificial Sequence
  SARM1 targeting guide sequence portion
ccagccucuggcaugucuccuc

SEQ ID NO: 5902 - RNA, 22 nt, Artificial Sequence
  SARM1 targeting guide sequence portion
ccagcgacacaagccagggccg

SEQ ID NO: 5903 - RNA, 22 nt, Artificial Sequence
  SARM1 targeting guide sequence portion
ccagcgaggccacaagcggcuc

SEQ ID NO: 5904 - RNA, 22 nt, Artificial Sequence
  SARM1 targeting guide sequence portion
ccagcgccagcgcgcaguggcg

SEQ ID NO: 5905 - RNA, 22 nt, Artificial Sequence
  SARM1 targeting guide sequence portion
ccagcgcgcaguggcgcagcag

SEQ ID NO: 5906 - RNA, 22 nt, Artificial Sequence
  SARM1 targeting guide sequence portion
ccagcgugcccgagcgcuccac

SEQ ID NO: 5907 - RNA, 22 nt, Artificial Sequence
  SARM1 targeting guide sequence portion
ccagcucuacggguucgcguuc

SEQ ID NO: 5908 - RNA, 22 nt, Artificial Sequence
  SARM1 targeting guide sequence portion
ccaggccgccggccgccaccag

SEQ ID NO: 5909 - RNA, 22 nt, Artificial Sequence
  SARM1 targeting guide sequence portion
ccaggcggugcagcgacgcaug

SEQ ID NO: 5910 - RNA, 22 nt, Artificial Sequence
  SARM1 targeting guide sequence portion
ccagggccgcgggcccgacgac

SEQ ID NO: 5911 - RNA, 22 nt, Artificial Sequence
  SARM1 targeting guide sequence portion
ccaggguccagcgaggccacaa

SEQ ID NO: 5912 - RNA, 22 nt, Artificial Sequence
  SARM1 targeting guide sequence portion
ccagguucaggaucacgcccag

SEQ ID NO: 5913 - RNA, 22 nt, Artificial Sequence
  SARM1 targeting guide sequence portion
ccaucaagagccugcaaggcaa

SEQ ID NO: 5914 - RNA, 22 nt, Artificial Sequence
  SARM1 targeting guide sequence portion
ccaugcgucgcugcaccgccug

SEQ ID NO: 5915 - RNA, 22 nt, Artificial Sequence
  SARM1 targeting guide sequence portion
cccaaugcgcgccacgcggucu

SEQ ID NO: 5916 - RNA, 22 nt, Artificial Sequence
  SARM1 targeting guide sequence portion
cccaccuuggucuugccuugca

SEQ ID NO: 5917 - RNA, 22 nt, Artificial Sequence
  SARM1 targeting guide sequence portion
cccagcccaaugcgcgccacgc

SEQ ID NO: 5918 - RNA, 22 nt, Artificial Sequence
  SARM1 targeting guide sequence portion
cccagcgccagcgcgcaguggc

SEQ ID NO: 5919 - RNA, 22 nt, Artificial Sequence
  SARM1 targeting guide sequence portion
cccccgugcagcgcgcaguugc

SEQ ID NO: 5920 - RNA, 22 nt, Artificial Sequence
  SARM1 targeting guide sequence portion
ccccgaugcacugcgccuccaa

SEQ ID NO: 5921 - RNA, 22 nt, Artificial Sequence
  SARM1 targeting guide sequence portion
ccccgcgcugcugcgccacugc

SEQ ID NO: 5922 - RNA, 22 nt, Artificial Sequence
  SARM1 targeting guide sequence portion
ccccgugcagcgcgcaguugcc

SEQ ID NO: 5923 - RNA, 22 nt, Artificial Sequence
  SARM1 targeting guide sequence portion
cccgacgaccugcagcgccucg

SEQ ID NO: 5924 - RNA, 22 nt, Artificial Sequence
  SARM1 targeting guide sequence portion
cccgagcgcuccaccucgcgcu

SEQ ID NO: 5925 - RNA, 22 nt, Artificial Sequence
  SARM1 targeting guide sequence portion
cccgaugcacugcgccuccaag

SEQ ID NO: 5926 - RNA, 22 nt, Artificial Sequence
  SARM1 targeting guide sequence portion
cccgcgcugcugcgccacugcg

SEQ ID NO: 5927 - RNA, 22 nt, Artificial Sequence
  SARM1 targeting guide sequence portion
cccgcggcccuggcuugugucg

SEQ ID NO: 5928 - RNA, 22 nt, Artificial Sequence
  SARM1 targeting guide sequence portion
cccgcucgccuucuccaaggag

SEQ ID NO: 5929 - RNA, 22 nt, Artificial Sequence
  SARM1 targeting guide sequence portion
cccgcugucugguggacgccag

SEQ ID NO: 5930 - RNA, 22 nt, Artificial Sequence
  SARM1 targeting guide sequence portion
cccguagagcuggcgcggagcg

SEQ ID NO: 5931 - RNA, 22 nt, Artificial Sequence
  SARM1 targeting guide sequence portion
cccgugcagcgcgcaguugccc

SEQ ID NO: 5932 - RNA, 22 nt, Artificial Sequence
  SARM1 targeting guide sequence portion
cccuggccgcuucgcccgcugu

SEQ ID NO: 5933 - RNA, 22 nt, Artificial Sequence
  SARM1 targeting guide sequence portion
cccuggcuugugucgcuggcgu

SEQ ID NO: 5934 - RNA, 22 nt, Artificial Sequence
  SARM1 targeting guide sequence portion
ccgaagcagcucguccuccuug

SEQ ID NO: 5935 - RNA, 22 nt, Artificial Sequence
  SARM1 targeting guide sequence portion
ccgaaugcuugaacaugugcuc

SEQ ID NO: 5936 - RNA, 22 nt, Artificial Sequence
  SARM1 targeting guide sequence portion
ccgacgaccugcagcgccucgu

SEQ ID NO: 5937 - RNA, 22 nt, Artificial Sequence
  SARM1 targeting guide sequence portion
ccgagcgcuccaccucgcgcuc

SEQ ID NO: 5938 - RNA, 22 nt, Artificial Sequence
  SARM1 targeting guide sequence portion
ccgaggcugccaucaagagccu

SEQ ID NO: 5939 - RNA, 22 nt, Artificial Sequence
  SARM1 targeting guide sequence portion
ccgaguggcucuucccgcucgc

SEQ ID NO: 5940 - RNA, 22 nt, Artificial Sequence
  SARM1 targeting guide sequence portion
ccgaugcacugcgccuccaagc

SEQ ID NO: 5941 - RNA, 22 nt, Artificial Sequence
  SARM1 targeting guide sequence portion
ccgcacggaccccgcgcugcug

SEQ ID NO: 5942 - RNA, 22 nt, Artificial Sequence
  SARM1 targeting guide sequence portion
ccgccaccagccucuggcaugu

SEQ ID NO: 5943 - RNA, 22 nt, Artificial Sequence
  SARM1 targeting guide sequence portion
ccgccggccgccaccagccucu

SEQ ID NO: 5944 - RNA, 22 nt, Artificial Sequence
  SARM1 targeting guide sequence portion
ccgccuggcccccgugcagcgc

SEQ ID NO: 5945 - RNA, 22 nt, Artificial Sequence
  SARM1 targeting guide sequence portion
ccgcgccagcucuacggguucg

SEQ ID NO: 5946 - RNA, 22 nt, Artificial Sequence
  SARM1 targeting guide sequence portion
ccgcgcugcugcgccacugcgc

SEQ ID NO: 5947 - RNA, 22 nt, Artificial Sequence
  SARM1 targeting guide sequence portion
ccgcggcccuggcuugugucgc

SEQ ID NO: 5948 - RNA, 22 nt, Artificial Sequence
  SARM1 targeting guide sequence portion
ccgcgggcccgacgaccugcag

SEQ ID NO: 5949 - RNA, 22 nt, Artificial Sequence
  SARM1 targeting guide sequence portion
ccgcguggcgcgcauugggcug

SEQ ID NO: 5950 - RNA, 22 nt, Artificial Sequence
  SARM1 targeting guide sequence portion
ccgcuacugcgaggcaggcgug

SEQ ID NO: 5951 - RNA, 22 nt, Artificial Sequence
  SARM1 targeting guide sequence portion
ccgcucgccuucuccaaggagg

SEQ ID NO: 5952 - RNA, 22 nt, Artificial Sequence
  SARM1 targeting guide sequence portion
ccgcugucugguggacgccagc

SEQ ID NO: 5953 - RNA, 22 nt, Artificial Sequence
  SARM1 targeting guide sequence portion
ccgcuucgcccgcugucuggug

SEQ ID NO: 5954 - RNA, 22 nt, Artificial Sequence
  SARM1 targeting guide sequence portion
ccgcuuggaggcgcagugcauc

SEQ ID NO: 5955 - RNA, 22 nt, Artificial Sequence
  SARM1 targeting guide sequence portion
ccgcuuguggccucgcuggacc

SEQ ID NO: 5956 - RNA, 22 nt, Artificial Sequence
  SARM1 targeting guide sequence portion
ccggccgccaccagccucuggc

SEQ ID NO: 5957 - RNA, 22 nt, Artificial Sequence
  SARM1 targeting guide sequence portion
ccggcggccuggacgcggugcu

SEQ ID NO: 5958 - RNA, 22 nt, Artificial Sequence
  SARM1 targeting guide sequence portion
ccguagagcuggcgcggagcgu

SEQ ID NO: 5959 - RNA, 22 nt, Artificial Sequence
  SARM1 targeting guide sequence portion
ccgugcagcgcgcaguugccca

SEQ ID NO: 5960 - RNA, 22 nt, Artificial Sequence
  SARM1 targeting guide sequence portion
ccgugcggcggcaccaauacag

SEQ ID NO: 5961 - RNA, 22 nt, Artificial Sequence
  SARM1 targeting guide sequence portion
ccguugcucgacucuaaccgcu

SEQ ID NO: 5962 - RNA, 22 nt, Artificial Sequence
  SARM1 targeting guide sequence portion
ccuccaagcgguuagagucgag

SEQ ID NO: 5963 - RNA, 22 nt, Artificial Sequence
  SARM1 targeting guide sequence portion
ccuccgaaugcuugaacaugug

SEQ ID NO: 5964 - RNA, 22 nt, Artificial Sequence
  SARM1 targeting guide sequence portion
ccuccuuggagaaggcgagcgg

SEQ ID NO: 5965 - RNA, 22 nt, Artificial Sequence
  SARM1 targeting guide sequence portion
ccuccuuguuagucgccaacac

SEQ ID NO: 5966 - RNA, 22 nt, Artificial Sequence
  SARM1 targeting guide sequence portion
ccucgcaguagcgguguuggcg

SEQ ID NO: 5967 - RNA, 22 nt, Artificial Sequence
  SARM1 targeting guide sequence portion
ccucgcgcuccaccuccuuguu

SEQ ID NO: 5968 - RNA, 22 nt, Artificial Sequence
  SARM1 targeting guide sequence portion
ccucgcuggacccuggccgcuu

SEQ ID NO: 5969 - RNA, 22 nt, Artificial Sequence
  SARM1 targeting guide sequence portion
ccucggcgcagagguagaaagc

SEQ ID NO: 5970 - RNA, 22 nt, Artificial Sequence
  SARM1 targeting guide sequence portion
ccucgugccguugcucgacucu

SEQ ID NO: 5971 - RNA, 22 nt, Artificial Sequence
  SARM1 targeting guide sequence portion
ccucugcgccgaggcugccauc

SEQ ID NO: 5972 - RNA, 22 nt, Artificial Sequence
  SARM1 targeting guide sequence portion
ccucuggcaugucuccuccgaa

SEQ ID NO: 5973 - RNA, 22 nt, Artificial Sequence
  SARM1 targeting guide sequence portion
ccugaaccuggcgaaggaacgc

SEQ ID NO: 5974 - RNA, 22 nt, Artificial Sequence
  SARM1 targeting guide sequence portion
ccugcagcgccucgugccguug

SEQ ID NO: 5975 - RNA, 22 nt, Artificial Sequence
  SARM1 targeting guide sequence portion
ccugccacgcuccgcgccagcu

SEQ ID NO: 5976 - RNA, 22 nt, Artificial Sequence
  SARM1 targeting guide sequence portion
ccugccucgcaguagcgguguu

SEQ ID NO: 5977 - RNA, 22 nt, Artificial Sequence
  SARM1 targeting guide sequence portion
ccuggacgcggugcuguauugg

SEQ ID NO: 5978 - RNA, 22 nt, Artificial Sequence
  SARM1 targeting guide sequence portion
ccuggcccccgugcagcgcgca

SEQ ID NO: 5979 - RNA, 22 nt, Artificial Sequence
  SARM1 targeting guide sequence portion
ccuggccgcuucgcccgcuguc

SEQ ID NO: 5980 - RNA, 22 nt, Artificial Sequence
  SARM1 targeting guide sequence portion
ccuggcgaaggaacgcgaaccc

SEQ ID NO: 5981 - RNA, 22 nt, Artificial Sequence
  SARM1 targeting guide sequence portion
ccuggcuugugucgcuggcguc

SEQ ID NO: 5982 - RNA, 22 nt, Artificial Sequence
  SARM1 targeting guide sequence portion
ccuucgccagguucaggaucac

SEQ ID NO: 5983 - RNA, 22 nt, Artificial Sequence
  SARM1 targeting guide sequence portion
ccuucuccaaggaggacgagcu

SEQ ID NO: 5984 - RNA, 22 nt, Artificial Sequence
  SARM1 targeting guide sequence portion
ccuugcaggcucuugauggcag

SEQ ID NO: 5985 - RNA, 22 nt, Artificial Sequence
  SARM1 targeting guide sequence portion
ccuuggagaaggcgagcgggaa

SEQ ID NO: 5986 - RNA, 22 nt, Artificial Sequence
  SARM1 targeting guide sequence portion
ccuuggucuugccuugcaggcu

SEQ ID NO: 5987 - RNA, 22 nt, Artificial Sequence
  SARM1 targeting guide sequence portion
ccuuguuagucgccaacaccgc

SEQ ID NO: 5988 - RNA, 22 nt, Artificial Sequence
  SARM1 targeting guide sequence portion
cgaacccguagagcuggcgcgg

SEQ ID NO: 5989 - RNA, 22 nt, Artificial Sequence
  SARM1 targeting guide sequence portion
cgaagcagcucguccuccuugg

SEQ ID NO: 5990 - RNA, 22 nt, Artificial Sequence
  SARM1 targeting guide sequence portion
cgaagcggccaggguccagcga

SEQ ID NO: 5991 - RNA, 22 nt, Artificial Sequence
  SARM1 targeting guide sequence portion
cgaaggaacgcgaacccguaga

SEQ ID NO: 5992 - RNA, 22 nt, Artificial Sequence
  SARM1 targeting guide sequence portion
cgaaugcuugaacaugugcucc

SEQ ID NO: 5993 - RNA, 22 nt, Artificial Sequence
  SARM1 targeting guide sequence portion
cgacacaagccagggccgcggg

SEQ ID NO: 5994 - RNA, 22 nt, Artificial Sequence
  SARM1 targeting guide sequence portion
cgaccugcagcgccucgugccg

SEQ ID NO: 5995 - RNA, 22 nt, Artificial Sequence
  SARM1 targeting guide sequence portion
cgacgaccugcagcgccucgug

SEQ ID NO: 5996 - RNA, 22 nt, Artificial Sequence
  SARM1 targeting guide sequence portion
cgacgcaugguagagaagcgcg

SEQ ID NO: 5997 - RNA, 22 nt, Artificial Sequence
  SARM1 targeting guide sequence portion
cgacuaacaaggagguggagcg

SEQ ID NO: 5998 - RNA, 22 nt, Artificial Sequence
  SARM1 targeting guide sequence portion
cgacucuaaccgcuuggaggcg

SEQ ID NO: 5999 - RNA, 22 nt, Artificial Sequence
  SARM1 targeting guide sequence portion
cgagcaacggcacgaggcgcug

SEQ ID NO: 6000 - RNA, 22 nt, Artificial Sequence
  SARM1 targeting guide sequence portion
cgagcgccagcgugcccgagcg

SEQ ID NO: 6001 - RNA, 22 nt, Artificial Sequence
  SARM1 targeting guide sequence portion
cgagcgcuccaccucgcgcucc

SEQ ID NO: 6002 - RNA, 22 nt, Artificial Sequence
  SARM1 targeting guide sequence portion
cgagcgggaagagccacucggc

SEQ ID NO: 6003 - RNA, 22 nt, Artificial Sequence
  SARM1 targeting guide sequence portion
cgagcugcuucggcugcacgcc

SEQ ID NO: 6004 - RNA, 22 nt, Artificial Sequence
  SARM1 targeting guide sequence portion
cgaggcaggcgugcagccgaag

SEQ ID NO: 6005 - RNA, 22 nt, Artificial Sequence
  SARM1 targeting guide sequence portion
cgaggccacaagcggcuccacg

SEQ ID NO: 6006 - RNA, 22 nt, Artificial Sequence
  SARM1 targeting guide sequence portion
cgaggcgcugcaggucgucggg

SEQ ID NO: 6007 - RNA, 22 nt, Artificial Sequence
  SARM1 targeting guide sequence portion
cgaggcugccaucaagagccug

SEQ ID NO: 6008 - RNA, 22 nt, Artificial Sequence
  SARM1 targeting guide sequence portion
cgagguggagcgcucgggcacg

SEQ ID NO: 6009 - RNA, 22 nt, Artificial Sequence
  SARM1 targeting guide sequence portion
cgaguggcucuucccgcucgcc

SEQ ID NO: 6010 - RNA, 22 nt, Artificial Sequence
  SARM1 targeting guide sequence portion
cgaugcacugcgccuccaagcg

SEQ ID NO: 6011 - RNA, 22 nt, Artificial Sequence
  SARM1 targeting guide sequence portion
cgcacggaccccgcgcugcugc

SEQ ID NO: 6012 - RNA, 22 nt, Artificial Sequence
  SARM1 targeting guide sequence portion
cgcagagguagaaagccccgau

SEQ ID NO: 6013 - RNA, 22 nt, Artificial Sequence
  SARM1 targeting guide sequence portion
cgcagccgaguggcucuucccg

SEQ ID NO: 6014 - RNA, 22 nt, Artificial Sequence
  SARM1 targeting guide sequence portion
cgcaguagcgguguuggcgacu

SEQ ID NO: 6015 - RNA, 22 nt, Artificial Sequence
  SARM1 targeting guide sequence portion
cgcagugcaucggggcuuucua

SEQ ID NO: 6016 - RNA, 22 nt, Artificial Sequence
  SARM1 targeting guide sequence portion
cgcaguggcgcagcagcgcggg

SEQ ID NO: 6017 - RNA, 22 nt, Artificial Sequence
  SARM1 targeting guide sequence portion
cgcaguugcccagcgccagcgc

SEQ ID NO: 6018 - RNA, 22 nt, Artificial Sequence
  SARM1 targeting guide sequence portion
cgcaugguagagaagcgcgcag

SEQ ID NO: 6019 - RNA, 22 nt, Artificial Sequence
  SARM1 targeting guide sequence portion
cgcauugggcugggcgugaucc

SEQ ID NO: 6020 - RNA, 22 nt, Artificial Sequence
  SARM1 targeting guide sequence portion
cgccaacaccgcuacugcgagg

SEQ ID NO: 6021 - RNA, 22 nt, Artificial Sequence
  SARM1 targeting guide sequence portion
cgccaccagccucuggcauguc

SEQ ID NO: 6022 - RNA, 22 nt, Artificial Sequence
  SARM1 targeting guide sequence portion
cgccacugcgcgcuggcgcugg

SEQ ID NO: 6023 - RNA, 22 nt, Artificial Sequence
  SARM1 targeting guide sequence portion
cgccagcgacacaagccagggc

SEQ ID NO: 6024 - RNA, 22 nt, Artificial Sequence
  SARM1 targeting guide sequence portion
cgccagcgcgcaguggcgcagc

SEQ ID NO: 6025 - RNA, 22 nt, Artificial Sequence
  SARM1 targeting guide sequence portion
cgccagcgugcccgagcgcucc

SEQ ID NO: 6026 - RNA, 22 nt, Artificial Sequence
  SARM1 targeting guide sequence portion
cgccagcucuacggguucgcgu

SEQ ID NO: 6027 - RNA, 22 nt, Artificial Sequence
  SARM1 targeting guide sequence portion
cgccagguucaggaucacgccc

SEQ ID NO: 6028 - RNA, 22 nt, Artificial Sequence
  SARM1 targeting guide sequence portion
cgcccagcccaaugcgcgccac

SEQ ID NO: 6029 - RNA, 22 nt, Artificial Sequence
  SARM1 targeting guide sequence portion
cgcccgcugucugguggacgcc

SEQ ID NO: 6030 - RNA, 22 nt, Artificial Sequence
  SARM1 targeting guide sequence portion
cgccgaggcugccaucaagagc

SEQ ID NO: 6031 - RNA, 22 nt, Artificial Sequence
  SARM1 targeting guide sequence portion
cgccggccgccaccagccucug

SEQ ID NO: 6032 - RNA, 22 nt, Artificial Sequence
  SARM1 targeting guide sequence portion
cgccuccaagcgguuagagucg

SEQ ID NO: 6033 - RNA, 22 nt, Artificial Sequence
  SARM1 targeting guide sequence portion
cgccucgugccguugcucgacu

SEQ ID NO: 6034 - RNA, 22 nt, Artificial Sequence
  SARM1 targeting guide sequence portion
cgccugccucgcaguagcggug

SEQ ID NO: 6035 - RNA, 22 nt, Artificial Sequence
  SARM1 targeting guide sequence portion
cgccuggcccccgugcagcgcg

SEQ ID NO: 6036 - RNA, 22 nt, Artificial Sequence
  SARM1 targeting guide sequence portion
cgccuucuccaaggaggacgag

SEQ ID NO: 6037 - RNA, 22 nt, Artificial Sequence
  SARM1 targeting guide sequence portion
cgcgaacccguagagcuggcgc

SEQ ID NO: 6038 - RNA, 22 nt, Artificial Sequence
  SARM1 targeting guide sequence portion
cgcgagguggagcgcucgggca

SEQ ID NO: 6039 - RNA, 22 nt, Artificial Sequence
  SARM1 targeting guide sequence portion
cgcgcagccgaguggcucuucc

SEQ ID NO: 6040 - RNA, 22 nt, Artificial Sequence
  SARM1 targeting guide sequence portion
cgcgcaguggcgcagcagcgcg

SEQ ID NO: 6041 - RNA, 22 nt, Artificial Sequence
  SARM1 targeting guide sequence portion
cgcgcaguugcccagcgccagc

SEQ ID NO: 6042 - RNA, 22 nt, Artificial Sequence
  SARM1 targeting guide sequence portion
cgcgcauugggcugggcgugau

SEQ ID NO: 6043 - RNA, 22 nt, Artificial Sequence
  SARM1 targeting guide sequence portion
cgcgccagcucuacggguucgc

SEQ ID NO: 6044 - RNA, 22 nt, Artificial Sequence
  SARM1 targeting guide sequence portion
cgcgcuccaccuccuuguuagu

SEQ ID NO: 6045 - RNA, 22 nt, Artificial Sequence
  SARM1 targeting guide sequence portion
cgcgcugcacgggggccaggcg

SEQ ID NO: 6046 - RNA, 22 nt, Artificial Sequence
  SARM1 targeting guide sequence portion
cgcgcugcugcgccacugcgcg

SEQ ID NO: 6047 - RNA, 22 nt, Artificial Sequence
  SARM1 targeting guide sequence portion
cgcgcuggcgcugggcaacugc

SEQ ID NO: 6048 - RNA, 22 nt, Artificial Sequence
  SARM1 targeting guide sequence portion
cgcgcuucucuaccaugcgucg

SEQ ID NO: 6049 - RNA, 22 nt, Artificial Sequence
  SARM1 targeting guide sequence portion
cgcggagcguggcaggcaucuu

SEQ ID NO: 6050 - RNA, 22 nt, Artificial Sequence
  SARM1 targeting guide sequence portion
cgcggcccuggcuugugucgcu

SEQ ID NO: 6051 - RNA, 22 nt, Artificial Sequence
  SARM1 targeting guide sequence portion
cgcgggcccgacgaccugcagc

SEQ ID NO: 6052 - RNA, 22 nt, Artificial Sequence
  SARM1 targeting guide sequence portion
cgcgggguccgugcggcggcac

SEQ ID NO: 6053 - RNA, 22 nt, Artificial Sequence
  SARM1 targeting guide sequence portion
cgcggugcuguauuggugccgc

SEQ ID NO: 6054 - RNA, 22 nt, Artificial Sequence
  SARM1 targeting guide sequence portion
cgcguggcgcgcauugggcugg

SEQ ID NO: 6055 - RNA, 22 nt, Artificial Sequence
  SARM1 targeting guide sequence portion
cgcguuccuucgccagguucag

SEQ ID NO: 6056 - RNA, 22 nt, Artificial Sequence
  SARM1 targeting guide sequence portion
cgcuacugcgaggcaggcgugc

SEQ ID NO: 6057 - RNA, 22 nt, Artificial Sequence
  SARM1 targeting guide sequence portion
cgcuccaccuccuuguuagucg

SEQ ID NO: 6058 - RNA, 22 nt, Artificial Sequence
  SARM1 targeting guide sequence portion
cgcuccaccucgcgcuccaccu

SEQ ID NO: 6059 - RNA, 22 nt, Artificial Sequence
  SARM1 targeting guide sequence portion
cgcuccgcgccagcucuacggg

SEQ ID NO: 6060 - RNA, 22 nt, Artificial Sequence
  SARM1 targeting guide sequence portion
cgcucgccuucuccaaggagga

SEQ ID NO: 6061 - RNA, 22 nt, Artificial Sequence
  SARM1 targeting guide sequence portion
cgcucgggcacgcuggcgcucg

SEQ ID NO: 6062 - RNA, 22 nt, Artificial Sequence
  SARM1 targeting guide sequence portion
cgcucguggagccgcuuguggc

SEQ ID NO: 6063 - RNA, 22 nt, Artificial Sequence
  SARM1 targeting guide sequence portion
cgcugcaccgccuggcccccgu

SEQ ID NO: 6064 - RNA, 22 nt, Artificial Sequence
  SARM1 targeting guide sequence portion
cgcugcacgggggccaggcggu

SEQ ID NO: 6065 - RNA, 22 nt, Artificial Sequence
  SARM1 targeting guide sequence portion
cgcugcaggucgucgggcccgc

SEQ ID NO: 6066 - RNA, 22 nt, Artificial Sequence
  SARM1 targeting guide sequence portion
cgcugcugcgccacugcgcgcu

SEQ ID NO: 6067 - RNA, 22 nt, Artificial Sequence
  SARM1 targeting guide sequence portion
cgcuggacccuggccgcuucgc

SEQ ID NO: 6068 - RNA, 22 nt, Artificial Sequence
  SARM1 targeting guide sequence portion
cgcuggcgcucguggagccgcu

SEQ ID NO: 6069 - RNA, 22 nt, Artificial Sequence
  SARM1 targeting guide sequence portion
cgcuggcgcugggcaacugcgc

SEQ ID NO: 6070 - RNA, 22 nt, Artificial Sequence
  SARM1 targeting guide sequence portion
cgcuggcguccaccagacagcg

SEQ ID NO: 6071 - RNA, 22 nt, Artificial Sequence
  SARM1 targeting guide sequence portion
cgcugggcaacugcgcgcugca

SEQ ID NO: 6072 - RNA, 22 nt, Artificial Sequence
  SARM1 targeting guide sequence portion
cgcugucugguggacgccagcg

SEQ ID NO: 6073 - RNA, 22 nt, Artificial Sequence
  SARM1 targeting guide sequence portion
cgcuucgcccgcugucuggugg

SEQ ID NO: 6074 - RNA, 22 nt, Artificial Sequence
  SARM1 targeting guide sequence portion
cgcuucucuaccaugcgucgcu

SEQ ID NO: 6075 - RNA, 22 nt, Artificial Sequence
  SARM1 targeting guide sequence portion
cgcuuggaggcgcagugcaucg

SEQ ID NO: 6076 - RNA, 22 nt, Artificial Sequence
  SARM1 targeting guide sequence portion
cgcuuguggccucgcuggaccc

SEQ ID NO: 6077 - RNA, 22 nt, Artificial Sequence
  SARM1 targeting guide sequence portion
cggaccccgcgcugcugcgcca

SEQ ID NO: 6078 - RNA, 22 nt, Artificial Sequence
  SARM1 targeting guide sequence portion
cggagcguggcaggcaucuugg

SEQ ID NO: 6079 - RNA, 22 nt, Artificial Sequence
  SARM1 targeting guide sequence portion
cggaggagacaugccagaggcu

SEQ ID NO: 6080 - RNA, 22 nt, Artificial Sequence
  SARM1 targeting guide sequence portion
cggcaccaauacagcaccgcgu

SEQ ID NO: 6081 - RNA, 22 nt, Artificial Sequence
  SARM1 targeting guide sequence portion
cggcacgaggcgcugcaggucg

SEQ ID NO: 6082 - RNA, 22 nt, Artificial Sequence
  SARM1 targeting guide sequence portion
cggccaggguccagcgaggcca

SEQ ID NO: 6083 - RNA, 22 nt, Artificial Sequence
  SARM1 targeting guide sequence portion
cggcccuggcuugugucgcugg

SEQ ID NO: 6084 - RNA, 22 nt, Artificial Sequence
  SARM1 targeting guide sequence portion
cggccgccaccagccucuggca

SEQ ID NO: 6085 - RNA, 22 nt, Artificial Sequence
  SARM1 targeting guide sequence portion
cggccggcggccuggacgcggu

SEQ ID NO: 6086 - RNA, 22 nt, Artificial Sequence
  SARM1 targeting guide sequence portion
cggccuggacgcggugcuguau

SEQ ID NO: 6087 - RNA, 22 nt, Artificial Sequence
  SARM1 targeting guide sequence portion
cggcgcagagguagaaagcccc

SEQ ID NO: 6088 - RNA, 22 nt, Artificial Sequence
  SARM1 targeting guide sequence portion
cggcggcaccaauacagcaccg

SEQ ID NO: 6089 - RNA, 22 nt, Artificial Sequence
  SARM1 targeting guide sequence portion
cggcggccuggacgcggugcug

SEQ ID NO: 6090 - RNA, 22 nt, Artificial Sequence
  SARM1 targeting guide sequence portion
cggcuccacgagcgccagcgug

SEQ ID NO: 6091 - RNA, 22 nt, Artificial Sequence
  SARM1 targeting guide sequence portion
cggcugcacgccugccucgcag

SEQ ID NO: 6092 - RNA, 22 nt, Artificial Sequence
  SARM1 targeting guide sequence portion
cggcugcgcgcuucucuaccau

SEQ ID NO: 6093 - RNA, 22 nt, Artificial Sequence
  SARM1 targeting guide sequence portion
cgggaagagccacucggcugcg

SEQ ID NO: 6094 - RNA, 22 nt, Artificial Sequence
  SARM1 targeting guide sequence portion
cgggcacgcuggcgcucgugga

SEQ ID NO: 6095 - RNA, 22 nt, Artificial Sequence
  SARM1 targeting guide sequence portion
cgggcccgacgaccugcagcgc

SEQ ID NO: 6096 - RNA, 22 nt, Artificial Sequence
  SARM1 targeting guide sequence portion
cgggcccgcggcccuggcuugu

SEQ ID NO: 6097 - RNA, 22 nt, Artificial Sequence
  SARM1 targeting guide sequence portion
cgggcgaagcggccagggucca

SEQ ID NO: 6098 - RNA, 22 nt, Artificial Sequence
  SARM1 targeting guide sequence portion
cggggcuuucuaccucugcgcc

SEQ ID NO: 6099 - RNA, 22 nt, Artificial Sequence
  SARM1 targeting guide sequence portion
cgggggccaggcggugcagcga

SEQ ID NO: 6100 - RNA, 22 nt, Artificial Sequence
  SARM1 targeting guide sequence portion
cgggguccgugcggcggcacca

SEQ ID NO: 6101 - RNA, 22 nt, Artificial Sequence
  SARM1 targeting guide sequence portion
cggguucgcguuccuucgccag

SEQ ID NO: 6102 - RNA, 22 nt, Artificial Sequence
  SARM1 targeting guide sequence portion
cggugcagcgacgcaugguaga

SEQ ID NO: 6103 - RNA, 22 nt, Artificial Sequence
  SARM1 targeting guide sequence portion
cggugcuguauuggugccgccg

SEQ ID NO: 6104 - RNA, 22 nt, Artificial Sequence
  SARM1 targeting guide sequence portion
cgguguuggcgacuaacaagga

SEQ ID NO: 6105 - RNA, 22 nt, Artificial Sequence
  SARM1 targeting guide sequence portion
cgguuagagucgagcaacggca

SEQ ID NO: 6106 - RNA, 22 nt, Artificial Sequence
  SARM1 targeting guide sequence portion
cguagagcuggcgcggagcgug

SEQ ID NO: 6107 - RNA, 22 nt, Artificial Sequence
  SARM1 targeting guide sequence portion
cguccaccagacagcgggcgaa

SEQ ID NO: 6108 - RNA, 22 nt, Artificial Sequence
  SARM1 targeting guide sequence portion
cguccaggccgccggccgccac

SEQ ID NO: 6109 - RNA, 22 nt, Artificial Sequence
  SARM1 targeting guide sequence portion
cguccuccuuggagaaggcgag

SEQ ID NO: 6110 - RNA, 22 nt, Artificial Sequence
  SARM1 targeting guide sequence portion
cgucgcugcaccgccuggcccc

SEQ ID NO: 6111 - RNA, 22 nt, Artificial Sequence
  SARM1 targeting guide sequence portion
cgucgggcccgcggcccuggcu

SEQ ID NO: 6112 - RNA, 22 nt, Artificial Sequence
  SARM1 targeting guide sequence portion
cgugauccugaaccuggcgaag

SEQ ID NO: 6113 - RNA, 22 nt, Artificial Sequence
  SARM1 targeting guide sequence portion
cgugcagccgaagcagcucguc

SEQ ID NO: 6114 - RNA, 22 nt, Artificial Sequence
  SARM1 targeting guide sequence portion
cgugcagcgcgcaguugcccag

SEQ ID NO: 6115 - RNA, 22 nt, Artificial Sequence
  SARM1 targeting guide sequence portion
cgugcccgagcgcuccaccucg

SEQ ID NO: 6116 - RNA, 22 nt, Artificial Sequence
  SARM1 targeting guide sequence portion
cgugccguugcucgacucuaac

SEQ ID NO: 6117 - RNA, 22 nt, Artificial Sequence
  SARM1 targeting guide sequence portion
cgugcggcggcaccaauacagc

SEQ ID NO: 6118 - RNA, 22 nt, Artificial Sequence
  SARM1 targeting guide sequence portion
cguggagccgcuuguggccucg

SEQ ID NO: 6119 - RNA, 22 nt, Artificial Sequence
  SARM1 targeting guide sequence portion
cguggcaggcaucuuggagcac

SEQ ID NO: 6120 - RNA, 22 nt, Artificial Sequence
  SARM1 targeting guide sequence portion
cguggcgcgcauugggcugggc

SEQ ID NO: 6121 - RNA, 22 nt, Artificial Sequence
  SARM1 targeting guide sequence portion
cguuccuucgccagguucagga

SEQ ID NO: 6122 - RNA, 22 nt, Artificial Sequence
  SARM1 targeting guide sequence portion
cguugcucgacucuaaccgcuu

SEQ ID NO: 6123 - RNA, 22 nt, Artificial Sequence
  SARM1 targeting guide sequence portion
cuaacaaggagguggagcgcga

SEQ ID NO: 6124 - RNA, 22 nt, Artificial Sequence
  SARM1 targeting guide sequence portion
cuaaccgcuuggaggcgcagug

SEQ ID NO: 6125 - RNA, 22 nt, Artificial Sequence
  SARM1 targeting guide sequence portion
cuaccaugcgucgcugcaccgc

SEQ ID NO: 6126 - RNA, 22 nt, Artificial Sequence
  SARM1 targeting guide sequence portion
cuaccucugcgccgaggcugcc

SEQ ID NO: 6127 - RNA, 22 nt, Artificial Sequence
  SARM1 targeting guide sequence portion
cuacggguucgcguuccuucgc

SEQ ID NO: 6128 - RNA, 22 nt, Artificial Sequence
  SARM1 targeting guide sequence portion
cuacugcgaggcaggcgugcag

SEQ ID NO: 6129 - RNA, 22 nt, Artificial Sequence
  SARM1 targeting guide sequence portion
cuccaagaugccugccacgcuc

SEQ ID NO: 6130 - RNA, 22 nt, Artificial Sequence
  SARM1 targeting guide sequence portion
cuccaagcgguuagagucgagc

SEQ ID NO: 6131 - RNA, 22 nt, Artificial Sequence
  SARM1 targeting guide sequence portion
cuccaaggaggacgagcugcuu

SEQ ID NO: 6132 - RNA, 22 nt, Artificial Sequence
  SARM1 targeting guide sequence portion
cuccaccuccuuguuagucgcc

SEQ ID NO: 6133 - RNA, 22 nt, Artificial Sequence
  SARM1 targeting guide sequence portion
cuccaccucgcgcuccaccucc

SEQ ID NO: 6134 - RNA, 22 nt, Artificial Sequence
  SARM1 targeting guide sequence portion
cuccacgagcgccagcgugccc

SEQ ID NO: 6135 - RNA, 22 nt, Artificial Sequence
  SARM1 targeting guide sequence portion
cuccgaaugcuugaacaugugc

SEQ ID NO: 6136 - RNA, 22 nt, Artificial Sequence
  SARM1 targeting guide sequence portion
cuccgcgccagcucuacggguu

SEQ ID NO: 6137 - RNA, 22 nt, Artificial Sequence
  SARM1 targeting guide sequence portion
cuccuccgaaugcuugaacaug

SEQ ID NO: 6138 - RNA, 22 nt, Artificial Sequence
  SARM1 targeting guide sequence portion
cuccuuggagaaggcgagcggg

SEQ ID NO: 6139 - RNA, 22 nt, Artificial Sequence
  SARM1 targeting guide sequence portion
cuccuuguuagucgccaacacc

SEQ ID NO: 6140 - RNA, 22 nt, Artificial Sequence
  SARM1 targeting guide sequence portion
cucgacucuaaccgcuuggagg

SEQ ID NO: 6141 - RNA, 22 nt, Artificial Sequence
  SARM1 targeting guide sequence portion
cucgcaguagcgguguuggcga

SEQ ID NO: 6142 - RNA, 22 nt, Artificial Sequence
  SARM1 targeting guide sequence portion
cucgccuucuccaaggaggacg

SEQ ID NO: 6143 - RNA, 22 nt, Artificial Sequence
  SARM1 targeting guide sequence portion
cucgcgcuccaccuccuuguua

SEQ ID NO: 6144 - RNA, 22 nt, Artificial Sequence
  SARM1 targeting guide sequence portion
cucgcuggacccuggccgcuuc

SEQ ID NO: 6145 - RNA, 22 nt, Artificial Sequence
  SARM1 targeting guide sequence portion
cucggcgcagagguagaaagcc

SEQ ID NO: 6146 - RNA, 22 nt, Artificial Sequence
  SARM1 targeting guide sequence portion
cucggcugcgcgcuucucuacc

SEQ ID NO: 6147 - RNA, 22 nt, Artificial Sequence
  SARM1 targeting guide sequence portion
cucgggcacgcuggcgcucgug

SEQ ID NO: 6148 - RNA, 22 nt, Artificial Sequence
  SARM1 targeting guide sequence portion
cucguccuccuuggagaaggcg

SEQ ID NO: 6149 - RNA, 22 nt, Artificial Sequence
  SARM1 targeting guide sequence portion
cucgugccguugcucgacucua

SEQ ID NO: 6150 - RNA, 22 nt, Artificial Sequence
  SARM1 targeting guide sequence portion
cucguggagccgcuuguggccu

SEQ ID NO: 6151 - RNA, 22 nt, Artificial Sequence
  SARM1 targeting guide sequence portion
cucuaaccgcuuggaggcgcag

SEQ ID NO: 6152 - RNA, 22 nt, Artificial Sequence
  SARM1 targeting guide sequence portion
cucuaccaugcgucgcugcacc

SEQ ID NO: 6153 - RNA, 22 nt, Artificial Sequence
  SARM1 targeting guide sequence portion
cucuacggguucgcguuccuuc

SEQ ID NO: 6154 - RNA, 22 nt, Artificial Sequence
  SARM1 targeting guide sequence portion
cucugcgccgaggcugccauca

SEQ ID NO: 6155 - RNA, 22 nt, Artificial Sequence
  SARM1 targeting guide sequence portion
cucuggcaugucuccuccgaau

SEQ ID NO: 6156 - RNA, 22 nt, Artificial Sequence
  SARM1 targeting guide sequence portion
cucuucccgcucgccuucucca

SEQ ID NO: 6157 - RNA, 22 nt, Artificial Sequence
  SARM1 targeting guide sequence portion
cucuugauggcagccucggcgc

SEQ ID NO: 6158 - RNA, 22 nt, Artificial Sequence
  SARM1 targeting guide sequence portion
cugaaccuggcgaaggaacgcg

SEQ ID NO: 6159 - RNA, 22 nt, Artificial Sequence
  SARM1 targeting guide sequence portion
cugcaccgccuggcccccgugc

SEQ ID NO: 6160 - RNA, 22 nt, Artificial Sequence
  SARM1 targeting guide sequence portion
cugcacgccugccucgcaguag

SEQ ID NO: 6161 - RNA, 22 nt, Artificial Sequence
  SARM1 targeting guide sequence portion
cugcacgggggccaggcggugc

SEQ ID NO: 6162 - RNA, 22 nt, Artificial Sequence
  SARM1 targeting guide sequence portion
cugcagcgccucgugccguugc

SEQ ID NO: 6163 - RNA, 22 nt, Artificial Sequence
  SARM1 targeting guide sequence portion
cugcaggucgucgggcccgcgg

SEQ ID NO: 6164 - RNA, 22 nt, Artificial Sequence
  SARM1 targeting guide sequence portion
cugccacgcuccgcgccagcuc

SEQ ID NO: 6165 - RNA, 22 nt, Artificial Sequence
  SARM1 targeting guide sequence portion
cugccaucaagagccugcaagg

SEQ ID NO: 6166 - RNA, 22 nt, Artificial Sequence
  SARM1 targeting guide sequence portion
cugccucgcaguagcgguguug

SEQ ID NO: 6167 - RNA, 22 nt, Artificial Sequence
  SARM1 targeting guide sequence portion
cugcgaggcaggcgugcagccg

SEQ ID NO: 6168 - RNA, 22 nt, Artificial Sequence
  SARM1 targeting guide sequence portion
cugcgccacugcgcgcuggcgc

SEQ ID NO: 6169 - RNA, 22 nt, Artificial Sequence
  SARM1 targeting guide sequence portion
cugcgccgaggcugccaucaag

SEQ ID NO: 6170 - RNA, 22 nt, Artificial Sequence
  SARM1 targeting guide sequence portion
cugcgccuccaagcgguuagag

SEQ ID NO: 6171 - RNA, 22 nt, Artificial Sequence
  SARM1 targeting guide sequence portion
cugcgcgcugcacgggggccag

SEQ ID NO: 6172 - RNA, 22 nt, Artificial Sequence
  SARM1 targeting guide sequence portion
cugcgcgcuggcgcugggcaac

SEQ ID NO: 6173 - RNA, 22 nt, Artificial Sequence
  SARM1 targeting guide sequence portion
cugcgcgcuucucuaccaugcg

SEQ ID NO: 6174 - RNA, 22 nt, Artificial Sequence
  SARM1 targeting guide sequence portion
cugcugcgccacugcgcgcugg

SEQ ID NO: 6175 - RNA, 22 nt, Artificial Sequence
  SARM1 targeting guide sequence portion
cugcuucggcugcacgccugcc

SEQ ID NO: 6176 - RNA, 22 nt, Artificial Sequence
  SARM1 targeting guide sequence portion
cuggacccuggccgcuucgccc

SEQ ID NO: 6177 - RNA, 22 nt, Artificial Sequence
  SARM1 targeting guide sequence portion
cuggacgcggugcuguauuggu

SEQ ID NO: 6178 - RNA, 22 nt, Artificial Sequence
  SARM1 targeting guide sequence portion
cuggcaugucuccuccgaaugc

SEQ ID NO: 6179 - RNA, 22 nt, Artificial Sequence
  SARM1 targeting guide sequence portion
cuggcccccgugcagcgcgcag

SEQ ID NO: 6180 - RNA, 22 nt, Artificial Sequence
  SARM1 targeting guide sequence portion
cuggccgcuucgcccgcugucu

SEQ ID NO: 6181 - RNA, 22 nt, Artificial Sequence
  SARM1 targeting guide sequence portion
cuggcgaaggaacgcgaacccg

SEQ ID NO: 6182 - RNA, 22 nt, Artificial Sequence
  SARM1 targeting guide sequence portion
cuggcgcggagcguggcaggca

SEQ ID NO: 6183 - RNA, 22 nt, Artificial Sequence
  SARM1 targeting guide sequence portion
cuggcgcucguggagccgcuug

SEQ ID NO: 6184 - RNA, 22 nt, Artificial Sequence
  SARM1 targeting guide sequence portion
cuggcgcugggcaacugcgcgc

SEQ ID NO: 6185 - RNA, 22 nt, Artificial Sequence
  SARM1 targeting guide sequence portion
cuggcguccaccagacagcggg

SEQ ID NO: 6186 - RNA, 22 nt, Artificial Sequence
  SARM1 targeting guide sequence portion
cuggcuugugucgcuggcgucc

SEQ ID NO: 6187 - RNA, 22 nt, Artificial Sequence
  SARM1 targeting guide sequence portion
cugggcaacugcgcgcugcacg

SEQ ID NO: 6188 - RNA, 22 nt, Artificial Sequence
  SARM1 targeting guide sequence portion
cugggcgugauccugaaccugg

SEQ ID NO: 6189 - RNA, 22 nt, Artificial Sequence
  SARM1 targeting guide sequence portion
cugguggacgccagcgacacaa

SEQ ID NO: 6190 - RNA, 22 nt, Artificial Sequence
  SARM1 targeting guide sequence portion
cuguauuggugccgccgcacgg

SEQ ID NO: 6191 - RNA, 22 nt, Artificial Sequence
  SARM1 targeting guide sequence portion
cugucugguggacgccagcgac

SEQ ID NO: 6192 - RNA, 22 nt, Artificial Sequence
  SARM1 targeting guide sequence portion
cuucccgcucgccuucuccaag

SEQ ID NO: 6193 - RNA, 22 nt, Artificial Sequence
  SARM1 targeting guide sequence portion
cuucgccagguucaggaucacg

SEQ ID NO: 6194 - RNA, 22 nt, Artificial Sequence
  SARM1 targeting guide sequence portion
cuucgcccgcugucugguggac

SEQ ID NO: 6195 - RNA, 22 nt, Artificial Sequence
  SARM1 targeting guide sequence portion
cuucggcugcacgccugccucg

SEQ ID NO: 6196 - RNA, 22 nt, Artificial Sequence
  SARM1 targeting guide sequence portion
cuucuccaaggaggacgagcug

SEQ ID NO: 6197 - RNA, 22 nt, Artificial Sequence
  SARM1 targeting guide sequence portion
cuucucuaccaugcgucgcugc

SEQ ID NO: 6198 - RNA, 22 nt, Artificial Sequence
  SARM1 targeting guide sequence portion
cuugaacaugugcuccaagaug

SEQ ID NO: 6199 - RNA, 22 nt, Artificial Sequence
  SARM1 targeting guide sequence portion
cuugauggcagccucggcgcag

SEQ ID NO: 6200 - RNA, 22 nt, Artificial Sequence
  SARM1 targeting guide sequence portion
cuugcaggcucuugauggcagc

SEQ ID NO: 6201 - RNA, 22 nt, Artificial Sequence
  SARM1 targeting guide sequence portion
cuugccuugcaggcucuugaug

SEQ ID NO: 6202 - RNA, 22 nt, Artificial Sequence
  SARM1 targeting guide sequence portion
cuuggagaaggcgagcgggaag

SEQ ID NO: 6203 - RNA, 22 nt, Artificial Sequence
  SARM1 targeting guide sequence portion
cuuggagcacauguucaagcau

SEQ ID NO: 6204 - RNA, 22 nt, Artificial Sequence
  SARM1 targeting guide sequence portion
cuuggaggcgcagugcaucggg

SEQ ID NO: 6205 - RNA, 22 nt, Artificial Sequence
  SARM1 targeting guide sequence portion
cuuggucuugccuugcaggcuc

SEQ ID NO: 6206 - RNA, 22 nt, Artificial Sequence
  SARM1 targeting guide sequence portion
cuuguggccucgcuggacccug

SEQ ID NO: 6207 - RNA, 22 nt, Artificial Sequence
  SARM1 targeting guide sequence portion
cuugugucgcuggcguccacca

SEQ ID NO: 6208 - RNA, 22 nt, Artificial Sequence
  SARM1 targeting guide sequence portion
cuuguuagucgccaacaccgcu

SEQ ID NO: 6209 - RNA, 22 nt, Artificial Sequence
  SARM1 targeting guide sequence portion
cuuucuaccucugcgccgaggc

SEQ ID NO: 6210 - RNA, 22 nt, Artificial Sequence
  SARM1 targeting guide sequence portion
gaaagccccgaugcacugcgcc

SEQ ID NO: 6211 - RNA, 22 nt, Artificial Sequence
  SARM1 targeting guide sequence portion
gaacaugugcuccaagaugccu

SEQ ID NO: 6212 - RNA, 22 nt, Artificial Sequence
  SARM1 targeting guide sequence portion
gaacccguagagcuggcgcgga

SEQ ID NO: 6213 - RNA, 22 nt, Artificial Sequence
  SARM1 targeting guide sequence portion
gaaccuggcgaaggaacgcgaa

SEQ ID NO: 6214 - RNA, 22 nt, Artificial Sequence
  SARM1 targeting guide sequence portion
gaacgcgaacccguagagcugg

SEQ ID NO: 6215 - RNA, 22 nt, Artificial Sequence
  SARM1 targeting guide sequence portion
gaagagccacucggcugcgcgc

SEQ ID NO: 6216 - RNA, 22 nt, Artificial Sequence
  SARM1 targeting guide sequence portion
gaagcagcucguccuccuugga

SEQ ID NO: 6217 - RNA, 22 nt, Artificial Sequence
  SARM1 targeting guide sequence portion
gaagcgcgcagccgaguggcuc

SEQ ID NO: 6218 - RNA, 22 nt, Artificial Sequence
  SARM1 targeting guide sequence portion
gaagcggccaggguccagcgag

SEQ ID NO: 6219 - RNA, 22 nt, Artificial Sequence
  SARM1 targeting guide sequence portion
gaaggaacgcgaacccguagag

SEQ ID NO: 6220 - RNA, 22 nt, Artificial Sequence
  SARM1 targeting guide sequence portion
gaaggcgagcgggaagagccac

SEQ ID NO: 6221 - RNA, 22 nt, Artificial Sequence
  SARM1 targeting guide sequence portion
gaaugcuugaacaugugcucca

SEQ ID NO: 6222 - RNA, 22 nt, Artificial Sequence
  SARM1 targeting guide sequence portion
gacacaagccagggccgcgggc

SEQ ID NO: 6223 - RNA, 22 nt, Artificial Sequence
  SARM1 targeting guide sequence portion
gacagcgggcgaagcggccagg

SEQ ID NO: 6224 - RNA, 22 nt, Artificial Sequence
  SARM1 targeting guide sequence portion
gacaugccagaggcugguggcg

SEQ ID NO: 6225 - RNA, 22 nt, Artificial Sequence
  SARM1 targeting guide sequence portion
gaccccgcgcugcugcgccacu

SEQ ID NO: 6226 - RNA, 22 nt, Artificial Sequence
  SARM1 targeting guide sequence portion
gacccuggccgcuucgcccgcu

SEQ ID NO: 6227 - RNA, 22 nt, Artificial Sequence
  SARM1 targeting guide sequence portion
gaccgcguggcgcgcauugggc

SEQ ID NO: 6228 - RNA, 22 nt, Artificial Sequence
  SARM1 targeting guide sequence portion
gaccugcagcgccucgugccgu

SEQ ID NO: 6229 - RNA, 22 nt, Artificial Sequence
  SARM1 targeting guide sequence portion
gacgaccugcagcgccucgugc

SEQ ID NO: 6230 - RNA, 22 nt, Artificial Sequence
  SARM1 targeting guide sequence portion
gacgagcugcuucggcugcacg

SEQ ID NO: 6231 - RNA, 22 nt, Artificial Sequence
  SARM1 targeting guide sequence portion
gacgcaugguagagaagcgcgc

SEQ ID NO: 6232 - RNA, 22 nt, Artificial Sequence
  SARM1 targeting guide sequence portion
gacgccagcgacacaagccagg

SEQ ID NO: 6233 - RNA, 22 nt, Artificial Sequence
  SARM1 targeting guide sequence portion
gacgcggugcuguauuggugcc

SEQ ID NO: 6234 - RNA, 22 nt, Artificial Sequence
  SARM1 targeting guide sequence portion
gacuaacaaggagguggagcgc

SEQ ID NO: 6235 - RNA, 22 nt, Artificial Sequence
  SARM1 targeting guide sequence portion
gacucuaaccgcuuggaggcgc

SEQ ID NO: 6236 - RNA, 22 nt, Artificial Sequence
  SARM1 targeting guide sequence portion
gagaagcgcgcagccgaguggc

SEQ ID NO: 6237 - RNA, 22 nt, Artificial Sequence
  SARM1 targeting guide sequence portion
gagaaggcgagcgggaagagcc

SEQ ID NO: 6238 - RNA, 22 nt, Artificial Sequence
  SARM1 targeting guide sequence portion
gagacaugccagaggcuggugg

SEQ ID NO: 6239 - RNA, 22 nt, Artificial Sequence
  SARM1 targeting guide sequence portion
gagaccgcguggcgcgcauugg

SEQ ID NO: 6240 - RNA, 22 nt, Artificial Sequence
  SARM1 targeting guide sequence portion
gagcaacggcacgaggcgcugc

SEQ ID NO: 6241 - RNA, 22 nt, Artificial Sequence
  SARM1 targeting guide sequence portion
gagcacauguucaagcauucgg

SEQ ID NO: 6242 - RNA, 22 nt, Artificial Sequence
  SARM1 targeting guide sequence portion
gagccacucggcugcgcgcuuc

SEQ ID NO: 6243 - RNA, 22 nt, Artificial Sequence
  SARM1 targeting guide sequence portion
gagccgcuuguggccucgcugg

SEQ ID NO: 6244 - RNA, 22 nt, Artificial Sequence
  SARM1 targeting guide sequence portion
gagccugcaaggcaagaccaag

SEQ ID NO: 6245 - RNA, 22 nt, Artificial Sequence
  SARM1 targeting guide sequence portion
gagcgccagcgugcccgagcgc

SEQ ID NO: 6246 - RNA, 22 nt, Artificial Sequence
  SARM1 targeting guide sequence portion
gagcgcgagguggagcgcucgg

SEQ ID NO: 6247 - RNA, 22 nt, Artificial Sequence
  SARM1 targeting guide sequence portion
gagcgcuccaccucgcgcucca

SEQ ID NO: 6248 - RNA, 22 nt, Artificial Sequence
  SARM1 targeting guide sequence portion
gagcgcucgggcacgcuggcgc

SEQ ID NO: 6249 - RNA, 22 nt, Artificial Sequence
  SARM1 targeting guide sequence portion
gagcgggaagagccacucggcu

SEQ ID NO: 6250 - RNA, 22 nt, Artificial Sequence
  SARM1 targeting guide sequence portion
gagcguggcaggcaucuuggag

SEQ ID NO: 6251 - RNA, 22 nt, Artificial Sequence
  SARM1 targeting guide sequence portion
gagcugcuucggcugcacgccu

SEQ ID NO: 6252 - RNA, 22 nt, Artificial Sequence
  SARM1 targeting guide sequence portion
gagcuggcgcggagcguggcag

SEQ ID NO: 6253 - RNA, 22 nt, Artificial Sequence
  SARM1 targeting guide sequence portion
gaggacgagcugcuucggcugc

SEQ ID NO: 6254 - RNA, 22 nt, Artificial Sequence
  SARM1 targeting guide sequence portion
gaggagacaugccagaggcugg

SEQ ID NO: 6255 - RNA, 22 nt, Artificial Sequence
  SARM1 targeting guide sequence portion
gaggcaggcgugcagccgaagc

SEQ ID NO: 6256 - RNA, 22 nt, Artificial Sequence
  SARM1 targeting guide sequence portion
gaggccacaagcggcuccacga

SEQ ID NO: 6257 - RNA, 22 nt, Artificial Sequence
  SARM1 targeting guide sequence portion
gaggcgcagugcaucggggcuu

SEQ ID NO: 6258 - RNA, 22 nt, Artificial Sequence
  SARM1 targeting guide sequence portion
gaggcgcugcaggucgucgggc

SEQ ID NO: 6259 - RNA, 22 nt, Artificial Sequence
  SARM1 targeting guide sequence portion
gaggcugccaucaagagccugc

SEQ ID NO: 6260 - RNA, 22 nt, Artificial Sequence
  SARM1 targeting guide sequence portion
gaggcugguggcggccggcggc

SEQ ID NO: 6261 - RNA, 22 nt, Artificial Sequence
  SARM1 targeting guide sequence portion
gagguagaaagccccgaugcac

SEQ ID NO: 6262 - RNA, 22 nt, Artificial Sequence
  SARM1 targeting guide sequence portion
gagguggagcgcgagguggagc

SEQ ID NO: 6263 - RNA, 22 nt, Artificial Sequence
  SARM1 targeting guide sequence portion
gagguggagcgcucgggcacgc

SEQ ID NO: 6264 - RNA, 22 nt, Artificial Sequence
  SARM1 targeting guide sequence portion
gagucgagcaacggcacgaggc

SEQ ID NO: 6265 - RNA, 22 nt, Artificial Sequence
  SARM1 targeting guide sequence portion
gaguggcucuucccgcucgccu

SEQ ID NO: 6266 - RNA, 22 nt, Artificial Sequence
  SARM1 targeting guide sequence portion
gaucacgcccagcccaaugcgc

SEQ ID NO: 6267 - RNA, 22 nt, Artificial Sequence
  SARM1 targeting guide sequence portion
gauccugaaccuggcgaaggaa

SEQ ID NO: 6268 - RNA, 22 nt, Artificial Sequence
  SARM1 targeting guide sequence portion
gaugcacugcgccuccaagcgg

SEQ ID NO: 6269 - RNA, 22 nt, Artificial Sequence
  SARM1 targeting guide sequence portion
gaugccugccacgcuccgcgcc

SEQ ID NO: 6270 - RNA, 22 nt, Artificial Sequence
  SARM1 targeting guide sequence portion
gauggcagccucggcgcagagg

SEQ ID NO: 6271 - RNA, 22 nt, Artificial Sequence
  SARM1 targeting guide sequence portion
gcaacggcacgaggcgcugcag

SEQ ID NO: 6272 - RNA, 22 nt, Artificial Sequence
  SARM1 targeting guide sequence portion
gcaacugcgcgcugcacggggg

SEQ ID NO: 6273 - RNA, 22 nt, Artificial Sequence
  SARM1 targeting guide sequence portion
gcacauguucaagcauucggag

SEQ ID NO: 6274 - RNA, 22 nt, Artificial Sequence
  SARM1 targeting guide sequence portion
gcaccaauacagcaccgcgucc

SEQ ID NO: 6275 - RNA, 22 nt, Artificial Sequence
  SARM1 targeting guide sequence portion
gcaccgccuggcccccgugcag

SEQ ID NO: 6276 - RNA, 22 nt, Artificial Sequence
  SARM1 targeting guide sequence portion
gcacgaggcgcugcaggucguc

SEQ ID NO: 6277 - RNA, 22 nt, Artificial Sequence
  SARM1 targeting guide sequence portion
gcacgccugccucgcaguagcg

SEQ ID NO: 6278 - RNA, 22 nt, Artificial Sequence
  SARM1 targeting guide sequence portion
gcacgcuggcgcucguggagcc

SEQ ID NO: 6279 - RNA, 22 nt, Artificial Sequence
  SARM1 targeting guide sequence portion
gcacggaccccgcgcugcugcg

SEQ ID NO: 6280 - RNA, 22 nt, Artificial Sequence
  SARM1 targeting guide sequence portion
gcacgggggccaggcggugcag

SEQ ID NO: 6281 - RNA, 22 nt, Artificial Sequence
  SARM1 targeting guide sequence portion
gcacugcgccuccaagcgguua

SEQ ID NO: 6282 - RNA, 22 nt, Artificial Sequence
  SARM1 targeting guide sequence portion
gcagagaccgcguggcgcgcau

SEQ ID NO: 6283 - RNA, 22 nt, Artificial Sequence
  SARM1 targeting guide sequence portion
gcagagguagaaagccccgaug

SEQ ID NO: 6284 - RNA, 22 nt, Artificial Sequence
  SARM1 targeting guide sequence portion
gcagcagcgcgggguccgugcg

SEQ ID NO: 6285 - RNA, 22 nt, Artificial Sequence
  SARM1 targeting guide sequence portion
gcagccgaagcagcucguccuc

SEQ ID NO: 6286 - RNA, 22 nt, Artificial Sequence
  SARM1 targeting guide sequence portion
gcagccgaguggcucuucccgc

SEQ ID NO: 6287 - RNA, 22 nt, Artificial Sequence
  SARM1 targeting guide sequence portion
gcagccucggcgcagagguaga

SEQ ID NO: 6288 - RNA, 22 nt, Artificial Sequence
  SARM1 targeting guide sequence portion
gcagcgacgcaugguagagaag

SEQ ID NO: 6289 - RNA, 22 nt, Artificial Sequence
  SARM1 targeting guide sequence portion
gcagcgccucgugccguugcuc

SEQ ID NO: 6290 - RNA, 22 nt, Artificial Sequence
  SARM1 targeting guide sequence portion
gcagcgcgcaguugcccagcgc

SEQ ID NO: 6291 - RNA, 22 nt, Artificial Sequence
  SARM1 targeting guide sequence portion
gcagcgcgggguccgugcggcg

SEQ ID NO: 6292 - RNA, 22 nt, Artificial Sequence
  SARM1 targeting guide sequence portion
gcagcucguccuccuuggagaa

SEQ ID NO: 6293 - RNA, 22 nt, Artificial Sequence
  SARM1 targeting guide sequence portion
gcaggcaucuuggagcacaugu

SEQ ID NO: 6294 - RNA, 22 nt, Artificial Sequence
  SARM1 targeting guide sequence portion
gcaggcgugcagccgaagcagc

SEQ ID NO: 6295 - RNA, 22 nt, Artificial Sequence
  SARM1 targeting guide sequence portion
gcaggcucuugauggcagccuc

SEQ ID NO: 6296 - RNA, 22 nt, Artificial Sequence
  SARM1 targeting guide sequence portion
gcaggucgucgggcccgcggcc

SEQ ID NO: 6297 - RNA, 22 nt, Artificial Sequence
  SARM1 targeting guide sequence portion
gcaguagcgguguuggcgacua

SEQ ID NO: 6298 - RNA, 22 nt, Artificial Sequence
  SARM1 targeting guide sequence portion
gcagugcaucggggcuuucuac

SEQ ID NO: 6299 - RNA, 22 nt, Artificial Sequence
  SARM1 targeting guide sequence portion
gcaguggcgcagcagcgcgggg

SEQ ID NO: 6300 - RNA, 22 nt, Artificial Sequence
  SARM1 targeting guide sequence portion
gcaguugcccagcgccagcgcg

SEQ ID NO: 6301 - RNA, 22 nt, Artificial Sequence
  SARM1 targeting guide sequence portion
gcaucggggcuuucuaccucug

SEQ ID NO: 6302 - RNA, 22 nt, Artificial Sequence
  SARM1 targeting guide sequence portion
gcaucuuggagcacauguucaa

SEQ ID NO: 6303 - RNA, 22 nt, Artificial Sequence
  SARM1 targeting guide sequence portion
gcaugguagagaagcgcgcagc

SEQ ID NO: 6304 - RNA, 22 nt, Artificial Sequence
  SARM1 targeting guide sequence portion
gcaugucuccuccgaaugcuug

SEQ ID NO: 6305 - RNA, 22 nt, Artificial Sequence
  SARM1 targeting guide sequence portion
gcauucggaggagacaugccag

SEQ ID NO: 6306 - RNA, 22 nt, Artificial Sequence
  SARM1 targeting guide sequence portion
gcauugggcugggcgugauccu

SEQ ID NO: 6307 - RNA, 22 nt, Artificial Sequence
  SARM1 targeting guide sequence portion
gccaacaccgcuacugcgaggc

SEQ ID NO: 6308 - RNA, 22 nt, Artificial Sequence
  SARM1 targeting guide sequence portion
gccacaagcggcuccacgagcg

SEQ ID NO: 6309 - RNA, 22 nt, Artificial Sequence
  SARM1 targeting guide sequence portion
gccaccagccucuggcaugucu

SEQ ID NO: 6310 - RNA, 22 nt, Artificial Sequence
  SARM1 targeting guide sequence portion
gccacgcuccgcgccagcucua

SEQ ID NO: 6311 - RNA, 22 nt, Artificial Sequence
  SARM1 targeting guide sequence portion
gccacucggcugcgcgcuucuc

SEQ ID NO: 6312 - RNA, 22 nt, Artificial Sequence
  SARM1 targeting guide sequence portion
gccacugcgcgcuggcgcuggg

SEQ ID NO: 6313 - RNA, 22 nt, Artificial Sequence
  SARM1 targeting guide sequence portion
gccagaggcugguggcggccgg

SEQ ID NO: 6314 - RNA, 22 nt, Artificial Sequence
  SARM1 targeting guide sequence portion
gccagcgacacaagccagggcc

SEQ ID NO: 6315 - RNA, 22 nt, Artificial Sequence
  SARM1 targeting guide sequence portion
gccagcgcgcaguggcgcagca

SEQ ID NO: 6316 - RNA, 22 nt, Artificial Sequence
  SARM1 targeting guide sequence portion
gccagcgugcccgagcgcucca

SEQ ID NO: 6317 - RNA, 22 nt, Artificial Sequence
  SARM1 targeting guide sequence portion
gccagcucuacggguucgcguu

SEQ ID NO: 6318 - RNA, 22 nt, Artificial Sequence
  SARM1 targeting guide sequence portion
gccaggcggugcagcgacgcau

SEQ ID NO: 6319 - RNA, 22 nt, Artificial Sequence
  SARM1 targeting guide sequence portion
gccagggccgcgggcccgacga

SEQ ID NO: 6320 - RNA, 22 nt, Artificial Sequence
  SARM1 targeting guide sequence portion
gccaggguccagcgaggccaca

SEQ ID NO: 6321 - RNA, 22 nt, Artificial Sequence
  SARM1 targeting guide sequence portion
gccagguucaggaucacgccca

SEQ ID NO: 6322 - RNA, 22 nt, Artificial Sequence
  SARM1 targeting guide sequence portion
gccaucaagagccugcaaggca

SEQ ID NO: 6323 - RNA, 22 nt, Artificial Sequence
  SARM1 targeting guide sequence portion
gcccaaugcgcgccacgcgguc

SEQ ID NO: 6324 - RNA, 22 nt, Artificial Sequence
  SARM1 targeting guide sequence portion
gcccagcccaaugcgcgccacg

SEQ ID NO: 6325 - RNA, 22 nt, Artificial Sequence
  SARM1 targeting guide sequence portion
gcccagcgccagcgcgcagugg

SEQ ID NO: 6326 - RNA, 22 nt, Artificial Sequence
  SARM1 targeting guide sequence portion
gcccccgugcagcgcgcaguug

SEQ ID NO: 6327 - RNA, 22 nt, Artificial Sequence
  SARM1 targeting guide sequence portion
gccccgaugcacugcgccucca

SEQ ID NO: 6328 - RNA, 22 nt, Artificial Sequence
  SARM1 targeting guide sequence portion
gcccgacgaccugcagcgccuc

SEQ ID NO: 6329 - RNA, 22 nt, Artificial Sequence
  SARM1 targeting guide sequence portion
gcccgagcgcuccaccucgcgc

SEQ ID NO: 6330 - RNA, 22 nt, Artificial Sequence
  SARM1 targeting guide sequence portion
gcccgcggcccuggcuuguguc

SEQ ID NO: 6331 - RNA, 22 nt, Artificial Sequence
  SARM1 targeting guide sequence portion
gcccgcugucugguggacgcca

SEQ ID NO: 6332 - RNA, 22 nt, Artificial Sequence
  SARM1 targeting guide sequence portion
gcccuggcuugugucgcuggcg

SEQ ID NO: 6333 - RNA, 22 nt, Artificial Sequence
  SARM1 targeting guide sequence portion
gccgaagcagcucguccuccuu

SEQ ID NO: 6334 - RNA, 22 nt, Artificial Sequence
  SARM1 targeting guide sequence portion
gccgaggcugccaucaagagcc

SEQ ID NO: 6335 - RNA, 22 nt, Artificial Sequence
  SARM1 targeting guide sequence portion
gccgaguggcucuucccgcucg

SEQ ID NO: 6336 - RNA, 22 nt, Artificial Sequence
  SARM1 targeting guide sequence portion
gccgcacggaccccgcgcugcu

SEQ ID NO: 6337 - RNA, 22 nt, Artificial Sequence
  SARM1 targeting guide sequence portion
gccgccaccagccucuggcaug

SEQ ID NO: 6338 - RNA, 22 nt, Artificial Sequence
  SARM1 targeting guide sequence portion
gccgccggccgccaccagccuc

SEQ ID NO: 6339 - RNA, 22 nt, Artificial Sequence
  SARM1 targeting guide sequence portion
gccgcgggcccgacgaccugca

SEQ ID NO: 6340 - RNA, 22 nt, Artificial Sequence
  SARM1 targeting guide sequence portion
gccgcuucgcccgcugucuggu

SEQ ID NO: 6341 - RNA, 22 nt, Artificial Sequence
  SARM1 targeting guide sequence portion
gccgcuuguggccucgcuggac

SEQ ID NO: 6342 - RNA, 22 nt, Artificial Sequence
  SARM1 targeting guide sequence portion
gccggccgccaccagccucugg

SEQ ID NO: 6343 - RNA, 22 nt, Artificial Sequence
  SARM1 targeting guide sequence portion
gccggcggccuggacgcggugc

SEQ ID NO: 6344 - RNA, 22 nt, Artificial Sequence
  SARM1 targeting guide sequence portion
gccguugcucgacucuaaccgc

SEQ ID NO: 6345 - RNA, 22 nt, Artificial Sequence
  SARM1 targeting guide sequence portion
gccuccaagcgguuagagucga

SEQ ID NO: 6346 - RNA, 22 nt, Artificial Sequence
  SARM1 targeting guide sequence portion
gccucgcaguagcgguguuggc

SEQ ID NO: 6347 - RNA, 22 nt, Artificial Sequence
  SARM1 targeting guide sequence portion
gccucgcuggacccuggccgcu

SEQ ID NO: 6348 - RNA, 22 nt, Artificial Sequence
  SARM1 targeting guide sequence portion
gccucggcgcagagguagaaag

SEQ ID NO: 6349 - RNA, 22 nt, Artificial Sequence
  SARM1 targeting guide sequence portion
gccucgugccguugcucgacuc

SEQ ID NO: 6350 - RNA, 22 nt, Artificial Sequence
  SARM1 targeting guide sequence portion
gccucuggcaugucuccuccga

SEQ ID NO: 6351 - RNA, 22 nt, Artificial Sequence
  SARM1 targeting guide sequence portion
gccugccacgcuccgcgccagc

SEQ ID NO: 6352 - RNA, 22 nt, Artificial Sequence
  SARM1 targeting guide sequence portion
gccugccucgcaguagcggugu

SEQ ID NO: 6353 - RNA, 22 nt, Artificial Sequence
  SARM1 targeting guide sequence portion
gccuggacgcggugcuguauug

SEQ ID NO: 6354 - RNA, 22 nt, Artificial Sequence
  SARM1 targeting guide sequence portion
gccuggcccccgugcagcgcgc

SEQ ID NO: 6355 - RNA, 22 nt, Artificial Sequence
  SARM1 targeting guide sequence portion
gccuucuccaaggaggacgagc

SEQ ID NO: 6356 - RNA, 22 nt, Artificial Sequence
  SARM1 targeting guide sequence portion
gccuugcaggcucuugauggca

SEQ ID NO: 6357 - RNA, 22 nt, Artificial Sequence
  SARM1 targeting guide sequence portion
gcgaacccguagagcuggcgcg

SEQ ID NO: 6358 - RNA, 22 nt, Artificial Sequence
  SARM1 targeting guide sequence portion
gcgaagcggccaggguccagcg

SEQ ID NO: 6359 - RNA, 22 nt, Artificial Sequence
  SARM1 targeting guide sequence portion
gcgaaggaacgcgaacccguag

SEQ ID NO: 6360 - RNA, 22 nt, Artificial Sequence
  SARM1 targeting guide sequence portion
gcgacacaagccagggccgcgg

SEQ ID NO: 6361 - RNA, 22 nt, Artificial Sequence
  SARM1 targeting guide sequence portion
gcgacgcaugguagagaagcgc

SEQ ID NO: 6362 - RNA, 22 nt, Artificial Sequence
  SARM1 targeting guide sequence portion
gcgacuaacaaggagguggagc

SEQ ID NO: 6363 - RNA, 22 nt, Artificial Sequence
  SARM1 targeting guide sequence portion
gcgagcgggaagagccacucgg

SEQ ID NO: 6364 - RNA, 22 nt, Artificial Sequence
  SARM1 targeting guide sequence portion
gcgaggcaggcgugcagccgaa

SEQ ID NO: 6365 - RNA, 22 nt, Artificial Sequence
  SARM1 targeting guide sequence portion
gcgaggccacaagcggcuccac

SEQ ID NO: 6366 - RNA, 22 nt, Artificial Sequence
  SARM1 targeting guide sequence portion
gcgagguggagcgcucgggcac

SEQ ID NO: 6367 - RNA, 22 nt, Artificial Sequence
  SARM1 targeting guide sequence portion
gcgcagagguagaaagccccga

SEQ ID NO: 6368 - RNA, 22 nt, Artificial Sequence
  SARM1 targeting guide sequence portion
gcgcagccgaguggcucuuccc

SEQ ID NO: 6369 - RNA, 22 nt, Artificial Sequence
  SARM1 targeting guide sequence portion
gcgcagugcaucggggcuuucu

SEQ ID NO: 6370 - RNA, 22 nt, Artificial Sequence
  SARM1 targeting guide sequence portion
gcgcaguggcgcagcagcgcgg

SEQ ID NO: 6371 - RNA, 22 nt, Artificial Sequence
  SARM1 targeting guide sequence portion
gcgcaguugcccagcgccagcg

SEQ ID NO: 6372 - RNA, 22 nt, Artificial Sequence
  SARM1 targeting guide sequence portion
gcgcauugggcugggcgugauc

SEQ ID NO: 6373 - RNA, 22 nt, Artificial Sequence
  SARM1 targeting guide sequence portion
gcgccacugcgcgcuggcgcug

SEQ ID NO: 6374 - RNA, 22 nt, Artificial Sequence
  SARM1 targeting guide sequence portion
gcgccagcgcgcaguggcgcag

SEQ ID NO: 6375 - RNA, 22 nt, Artificial Sequence
  SARM1 targeting guide sequence portion
gcgccagcgugcccgagcgcuc

SEQ ID NO: 6376 - RNA, 22 nt, Artificial Sequence
  SARM1 targeting guide sequence portion
gcgccagcucuacggguucgcg

SEQ ID NO: 6377 - RNA, 22 nt, Artificial Sequence
  SARM1 targeting guide sequence portion
gcgccgaggcugccaucaagag

SEQ ID NO: 6378 - RNA, 22 nt, Artificial Sequence
  SARM1 targeting guide sequence portion
gcgccuccaagcgguuagaguc

SEQ ID NO: 6379 - RNA, 22 nt, Artificial Sequence
  SARM1 targeting guide sequence portion
gcgccucgugccguugcucgac

SEQ ID NO: 6380 - RNA, 22 nt, Artificial Sequence
  SARM1 targeting guide sequence portion
gcgcgagguggagcgcucgggc

SEQ ID NO: 6381 - RNA, 22 nt, Artificial Sequence
  SARM1 targeting guide sequence portion
gcgcgcagccgaguggcucuuc

SEQ ID NO: 6382 - RNA, 22 nt, Artificial Sequence
  SARM1 targeting guide sequence portion
gcgcgcaguggcgcagcagcgc

SEQ ID NO: 6383 - RNA, 22 nt, Artificial Sequence
  SARM1 targeting guide sequence portion
gcgcgcaguugcccagcgccag

SEQ ID NO: 6384 - RNA, 22 nt, Artificial Sequence
  SARM1 targeting guide sequence portion
gcgcgcauugggcugggcguga

SEQ ID NO: 6385 - RNA, 22 nt, Artificial Sequence
  SARM1 targeting guide sequence portion
gcgcgcugcacgggggccaggc

SEQ ID NO: 6386 - RNA, 22 nt, Artificial Sequence
  SARM1 targeting guide sequence portion
gcgcgcuggcgcugggcaacug

SEQ ID NO: 6387 - RNA, 22 nt, Artificial Sequence
  SARM1 targeting guide sequence portion
gcgcgcuucucuaccaugcguc

SEQ ID NO: 6388 - RNA, 22 nt, Artificial Sequence
  SARM1 targeting guide sequence portion
gcgcggagcguggcaggcaucu

SEQ ID NO: 6389 - RNA, 22 nt, Artificial Sequence
  SARM1 targeting guide sequence portion
gcgcgggguccgugcggcggca

SEQ ID NO: 6390 - RNA, 22 nt, Artificial Sequence
  SARM1 targeting guide sequence portion
gcgcuccaccuccuuguuaguc

SEQ ID NO: 6391 - RNA, 22 nt, Artificial Sequence
  SARM1 targeting guide sequence portion
gcgcuccaccucgcgcuccacc

SEQ ID NO: 6392 - RNA, 22 nt, Artificial Sequence
  SARM1 targeting guide sequence portion
gcgcucgggcacgcuggcgcuc

SEQ ID NO: 6393 - RNA, 22 nt, Artificial Sequence
  SARM1 targeting guide sequence portion
gcgcucguggagccgcuugugg

SEQ ID NO: 6394 - RNA, 22 nt, Artificial Sequence
  SARM1 targeting guide sequence portion
gcgcugcacgggggccaggcgg

SEQ ID NO: 6395 - RNA, 22 nt, Artificial Sequence
  SARM1 targeting guide sequence portion
gcgcugcugcgccacugcgcgc

SEQ ID NO: 6396 - RNA, 22 nt, Artificial Sequence
  SARM1 targeting guide sequence portion
gcgcuggcgcugggcaacugcg

SEQ ID NO: 6397 - RNA, 22 nt, Artificial Sequence
  SARM1 targeting guide sequence portion
gcgcugggcaacugcgcgcugc

SEQ ID NO: 6398 - RNA, 22 nt, Artificial Sequence
  SARM1 targeting guide sequence portion
gcgcuucucuaccaugcgucgc

SEQ ID NO: 6399 - RNA, 22 nt, Artificial Sequence
  SARM1 targeting guide sequence portion
gcggagcguggcaggcaucuug

SEQ ID NO: 6400 - RNA, 22 nt, Artificial Sequence
  SARM1 targeting guide sequence portion
gcggcaccaauacagcaccgcg

SEQ ID NO: 6401 - RNA, 22 nt, Artificial Sequence
  SARM1 targeting guide sequence portion
gcggccaggguccagcgaggcc

SEQ ID NO: 6402 - RNA, 22 nt, Artificial Sequence
  SARM1 targeting guide sequence portion
gcggcccuggcuugugucgcug

SEQ ID NO: 6403 - RNA, 22 nt, Artificial Sequence
  SARM1 targeting guide sequence portion
gcggccggcggccuggacgcgg

SEQ ID NO: 6404 - RNA, 22 nt, Artificial Sequence
  SARM1 targeting guide sequence portion
gcggccuggacgcggugcugua

SEQ ID NO: 6405 - RNA, 22 nt, Artificial Sequence
  SARM1 targeting guide sequence portion
gcggcggcaccaauacagcacc

SEQ ID NO: 6406 - RNA, 22 nt, Artificial Sequence
  SARM1 targeting guide sequence portion
gcggcuccacgagcgccagcgu

SEQ ID NO: 6407 - RNA, 22 nt, Artificial Sequence
  SARM1 targeting guide sequence portion
gcgggaagagccacucggcugc

SEQ ID NO: 6408 - RNA, 22 nt, Artificial Sequence
  SARM1 targeting guide sequence portion
gcgggcccgacgaccugcagcg

SEQ ID NO: 6409 - RNA, 22 nt, Artificial Sequence
  SARM1 targeting guide sequence portion
gcgggcgaagcggccagggucc

SEQ ID NO: 6410 - RNA, 22 nt, Artificial Sequence
  SARM1 targeting guide sequence portion
gcgggguccgugcggcggcacc

SEQ ID NO: 6411 - RNA, 22 nt, Artificial Sequence
  SARM1 targeting guide sequence portion
gcggugcagcgacgcaugguag

SEQ ID NO: 6412 - RNA, 22 nt, Artificial Sequence
  SARM1 targeting guide sequence portion
gcggugcuguauuggugccgcc

SEQ ID NO: 6413 - RNA, 22 nt, Artificial Sequence
  SARM1 targeting guide sequence portion
gcgguguuggcgacuaacaagg

SEQ ID NO: 6414 - RNA, 22 nt, Artificial Sequence
  SARM1 targeting guide sequence portion
gcgguuagagucgagcaacggc

SEQ ID NO: 6415 - RNA, 22 nt, Artificial Sequence
  SARM1 targeting guide sequence portion
gcguccaccagacagcgggcga

SEQ ID NO: 6416 - RNA, 22 nt, Artificial Sequence
  SARM1 targeting guide sequence portion
gcgucgcugcaccgccuggccc

SEQ ID NO: 6417 - RNA, 22 nt, Artificial Sequence
  SARM1 targeting guide sequence portion
gcgugauccugaaccuggcgaa

SEQ ID NO: 6418 - RNA, 22 nt, Artificial Sequence
  SARM1 targeting guide sequence portion
gcgugcagccgaagcagcucgu

SEQ ID NO: 6419 - RNA, 22 nt, Artificial Sequence
  SARM1 targeting guide sequence portion
gcgugcccgagcgcuccaccuc

SEQ ID NO: 6420 - RNA, 22 nt, Artificial Sequence
  SARM1 targeting guide sequence portion
gcguggcaggcaucuuggagca

SEQ ID NO: 6421 - RNA, 22 nt, Artificial Sequence
  SARM1 targeting guide sequence portion
gcguggcgcgcauugggcuggg

SEQ ID NO: 6422 - RNA, 22 nt, Artificial Sequence
  SARM1 targeting guide sequence portion
gcguuccuucgccagguucagg

SEQ ID NO: 6423 - RNA, 22 nt, Artificial Sequence
  SARM1 targeting guide sequence portion
gcuacugcgaggcaggcgugca

SEQ ID NO: 6424 - RNA, 22 nt, Artificial Sequence
  SARM1 targeting guide sequence portion
gcuccaagaugccugccacgcu

SEQ ID NO: 6425 - RNA, 22 nt, Artificial Sequence
  SARM1 targeting guide sequence portion
gcuccaccuccuuguuagucgc

SEQ ID NO: 6426 - RNA, 22 nt, Artificial Sequence
  SARM1 targeting guide sequence portion
gcuccaccucgcgcuccaccuc

SEQ ID NO: 6427 - RNA, 22 nt, Artificial Sequence
  SARM1 targeting guide sequence portion
gcuccacgagcgccagcgugcc

SEQ ID NO: 6428 - RNA, 22 nt, Artificial Sequence
  SARM1 targeting guide sequence portion
gcuccgcgccagcucuacgggu

SEQ ID NO: 6429 - RNA, 22 nt, Artificial Sequence
  SARM1 targeting guide sequence portion
gcucgacucuaaccgcuuggag

SEQ ID NO: 6430 - RNA, 22 nt, Artificial Sequence
  SARM1 targeting guide sequence portion
gcucgccuucuccaaggaggac

SEQ ID NO: 6431 - RNA, 22 nt, Artificial Sequence
  SARM1 targeting guide sequence portion
gcucgggcacgcuggcgcucgu

SEQ ID NO: 6432 - RNA, 22 nt, Artificial Sequence
  SARM1 targeting guide sequence portion
gcucguccuccuuggagaaggc

SEQ ID NO: 6433 - RNA, 22 nt, Artificial Sequence
  SARM1 targeting guide sequence portion
gcucguggagccgcuuguggcc

SEQ ID NO: 6434 - RNA, 22 nt, Artificial Sequence
  SARM1 targeting guide sequence portion
gcucuacggguucgcguuccuu

SEQ ID NO: 6435 - RNA, 22 nt, Artificial Sequence
  SARM1 targeting guide sequence portion
gcucuucccgcucgccuucucc

SEQ ID NO: 6436 - RNA, 22 nt, Artificial Sequence
  SARM1 targeting guide sequence portion
gcucuugauggcagccucggcg

SEQ ID NO: 6437 - RNA, 22 nt, Artificial Sequence
  SARM1 targeting guide sequence portion
gcugcaccgccuggcccccgug

SEQ ID NO: 6438 - RNA, 22 nt, Artificial Sequence
  SARM1 targeting guide sequence portion
gcugcacgccugccucgcagua

SEQ ID NO: 6439 - RNA, 22 nt, Artificial Sequence
  SARM1 targeting guide sequence portion
gcugcacgggggccaggcggug

SEQ ID NO: 6440 - RNA, 22 nt, Artificial Sequence
  SARM1 targeting guide sequence portion
gcugcaggucgucgggcccgcg

SEQ ID NO: 6441 - RNA, 22 nt, Artificial Sequence
  SARM1 targeting guide sequence portion
gcugccaucaagagccugcaag

SEQ ID NO: 6442 - RNA, 22 nt, Artificial Sequence
  SARM1 targeting guide sequence portion
gcugcgccacugcgcgcuggcg

SEQ ID NO: 6443 - RNA, 22 nt, Artificial Sequence
  SARM1 targeting guide sequence portion
gcugcgcgcuucucuaccaugc

SEQ ID NO: 6444 - RNA, 22 nt, Artificial Sequence
  SARM1 targeting guide sequence portion
gcugcugcgccacugcgcgcug

SEQ ID NO: 6445 - RNA, 22 nt, Artificial Sequence
  SARM1 targeting guide sequence portion
gcugcuucggcugcacgccugc

SEQ ID NO: 6446 - RNA, 22 nt, Artificial Sequence
  SARM1 targeting guide sequence portion
gcuggacccuggccgcuucgcc

SEQ ID NO: 6447 - RNA, 22 nt, Artificial Sequence
  SARM1 targeting guide sequence portion
gcuggcgcggagcguggcaggc

SEQ ID NO: 6448 - RNA, 22 nt, Artificial Sequence
  SARM1 targeting guide sequence portion
gcuggcgcucguggagccgcuu

SEQ ID NO: 6449 - RNA, 22 nt, Artificial Sequence
  SARM1 targeting guide sequence portion
gcuggcgcugggcaacugcgcg

SEQ ID NO: 6450 - RNA, 22 nt, Artificial Sequence
  SARM1 targeting guide sequence portion
gcuggcguccaccagacagcgg

SEQ ID NO: 6451 - RNA, 22 nt, Artificial Sequence
  SARM1 targeting guide sequence portion
gcugggcaacugcgcgcugcac

SEQ ID NO: 6452 - RNA, 22 nt, Artificial Sequence
  SARM1 targeting guide sequence portion
gcugggcgugauccugaaccug

SEQ ID NO: 6453 - RNA, 22 nt, Artificial Sequence
  SARM1 targeting guide sequence portion
gcuguauuggugccgccgcacg

SEQ ID NO: 6454 - RNA, 22 nt, Artificial Sequence
  SARM1 targeting guide sequence portion
gcugucugguggacgccagcga

SEQ ID NO: 6455 - RNA, 22 nt, Artificial Sequence
  SARM1 targeting guide sequence portion
gcuucgcccgcugucuggugga

SEQ ID NO: 6456 - RNA, 22 nt, Artificial Sequence
  SARM1 targeting guide sequence portion
gcuucggcugcacgccugccuc

SEQ ID NO: 6457 - RNA, 22 nt, Artificial Sequence
  SARM1 targeting guide sequence portion
gcuucucuaccaugcgucgcug

SEQ ID NO: 6458 - RNA, 22 nt, Artificial Sequence
  SARM1 targeting guide sequence portion
gcuugaacaugugcuccaagau

SEQ ID NO: 6459 - RNA, 22 nt, Artificial Sequence
  SARM1 targeting guide sequence portion
gcuuggaggcgcagugcaucgg

SEQ ID NO: 6460 - RNA, 22 nt, Artificial Sequence
  SARM1 targeting guide sequence portion
gcuuguggccucgcuggacccu

SEQ ID NO: 6461 - RNA, 22 nt, Artificial Sequence
  SARM1 targeting guide sequence portion
gcuugugucgcuggcguccacc

SEQ ID NO: 6462 - RNA, 22 nt, Artificial Sequence
  SARM1 targeting guide sequence portion
gcuuucuaccucugcgccgagg

SEQ ID NO: 6463 - RNA, 22 nt, Artificial Sequence
  SARM1 targeting guide sequence portion
ggaacgcgaacccguagagcug

SEQ ID NO: 6464 - RNA, 22 nt, Artificial Sequence
  SARM1 targeting guide sequence portion
ggaagagccacucggcugcgcg

SEQ ID NO: 6465 - RNA, 22 nt, Artificial Sequence
  SARM1 targeting guide sequence portion
ggaccccgcgcugcugcgccac

SEQ ID NO: 6466 - RNA, 22 nt, Artificial Sequence
  SARM1 targeting guide sequence portion
ggacccuggccgcuucgcccgc

SEQ ID NO: 6467 - RNA, 22 nt, Artificial Sequence
  SARM1 targeting guide sequence portion
ggacgagcugcuucggcugcac

SEQ ID NO: 6468 - RNA, 22 nt, Artificial Sequence
  SARM1 targeting guide sequence portion
ggacgccagcgacacaagccag

SEQ ID NO: 6469 - RNA, 22 nt, Artificial Sequence
  SARM1 targeting guide sequence portion
ggacgcggugcuguauuggugc

SEQ ID NO: 6470 - RNA, 22 nt, Artificial Sequence
  SARM1 targeting guide sequence portion
ggagaaggcgagcgggaagagc

SEQ ID NO: 6471 - RNA, 22 nt, Artificial Sequence
  SARM1 targeting guide sequence portion
ggagacaugccagaggcuggug

SEQ ID NO: 6472 - RNA, 22 nt, Artificial Sequence
  SARM1 targeting guide sequence portion
ggagcacauguucaagcauucg

SEQ ID NO: 6473 - RNA, 22 nt, Artificial Sequence
  SARM1 targeting guide sequence portion
ggagccgcuuguggccucgcug

SEQ ID NO: 6474 - RNA, 22 nt, Artificial Sequence
  SARM1 targeting guide sequence portion
ggagcgcgagguggagcgcucg

SEQ ID NO: 6475 - RNA, 22 nt, Artificial Sequence
  SARM1 targeting guide sequence portion
ggagcgcucgggcacgcuggcg

SEQ ID NO: 6476 - RNA, 22 nt, Artificial Sequence
  SARM1 targeting guide sequence portion
ggagcguggcaggcaucuugga

SEQ ID NO: 6477 - RNA, 22 nt, Artificial Sequence
  SARM1 targeting guide sequence portion
ggaggacgagcugcuucggcug

SEQ ID NO: 6478 - RNA, 22 nt, Artificial Sequence
  SARM1 targeting guide sequence portion
ggaggagacaugccagaggcug

SEQ ID NO: 6479 - RNA, 22 nt, Artificial Sequence
  SARM1 targeting guide sequence portion
ggaggcgcagugcaucggggcu

SEQ ID NO: 6480 - RNA, 22 nt, Artificial Sequence
  SARM1 targeting guide sequence portion
ggagguggagcgcgagguggag

SEQ ID NO: 6481 - RNA, 22 nt, Artificial Sequence
  SARM1 targeting guide sequence portion
ggaucacgcccagcccaaugcg

SEQ ID NO: 6482 - RNA, 22 nt, Artificial Sequence
  SARM1 targeting guide sequence portion
ggcaacugcgcgcugcacgggg

SEQ ID NO: 6483 - RNA, 22 nt, Artificial Sequence
  SARM1 targeting guide sequence portion
ggcaccaauacagcaccgcguc

SEQ ID NO: 6484 - RNA, 22 nt, Artificial Sequence
  SARM1 targeting guide sequence portion
ggcacgaggcgcugcaggucgu

SEQ ID NO: 6485 - RNA, 22 nt, Artificial Sequence
  SARM1 targeting guide sequence portion
ggcacgcuggcgcucguggagc

SEQ ID NO: 6486 - RNA, 22 nt, Artificial Sequence
  SARM1 targeting guide sequence portion
ggcagagaccgcguggcgcgca

SEQ ID NO: 6487 - RNA, 22 nt, Artificial Sequence
  SARM1 targeting guide sequence portion
ggcagccucggcgcagagguag

SEQ ID NO: 6488 - RNA, 22 nt, Artificial Sequence
  SARM1 targeting guide sequence portion
ggcaggcaucuuggagcacaug

SEQ ID NO: 6489 - RNA, 22 nt, Artificial Sequence
  SARM1 targeting guide sequence portion
ggcaggcgugcagccgaagcag

SEQ ID NO: 6490 - RNA, 22 nt, Artificial Sequence
  SARM1 targeting guide sequence portion
ggcaucuuggagcacauguuca

SEQ ID NO: 6491 - RNA, 22 nt, Artificial Sequence
  SARM1 targeting guide sequence portion
ggcaugucuccuccgaaugcuu

SEQ ID NO: 6492 - RNA, 22 nt, Artificial Sequence
  SARM1 targeting guide sequence portion
ggccacaagcggcuccacgagc

SEQ ID NO: 6493 - RNA, 22 nt, Artificial Sequence
  SARM1 targeting guide sequence portion
ggccaggcggugcagcgacgca

SEQ ID NO: 6494 - RNA, 22 nt, Artificial Sequence
  SARM1 targeting guide sequence portion
ggccaggguccagcgaggccac

SEQ ID NO: 6495 - RNA, 22 nt, Artificial Sequence
  SARM1 targeting guide sequence portion
ggcccccgugcagcgcgcaguu

SEQ ID NO: 6496 - RNA, 22 nt, Artificial Sequence
  SARM1 targeting guide sequence portion
ggcccgacgaccugcagcgccu

SEQ ID NO: 6497 - RNA, 22 nt, Artificial Sequence
  SARM1 targeting guide sequence portion
ggcccgcggcccuggcuugugu

SEQ ID NO: 6498 - RNA, 22 nt, Artificial Sequence
  SARM1 targeting guide sequence portion
ggcccuggcuugugucgcuggc

SEQ ID NO: 6499 - RNA, 22 nt, Artificial Sequence
  SARM1 targeting guide sequence portion
ggccgccaccagccucuggcau

SEQ ID NO: 6500 - RNA, 22 nt, Artificial Sequence
  SARM1 targeting guide sequence portion
ggccgccggccgccaccagccu

SEQ ID NO: 6501 - RNA, 22 nt, Artificial Sequence
  SARM1 targeting guide sequence portion
ggccgcuucgcccgcugucugg

SEQ ID NO: 6502 - RNA, 22 nt, Artificial Sequence
  SARM1 targeting guide sequence portion
ggccggcggccuggacgcggug

SEQ ID NO: 6503 - RNA, 22 nt, Artificial Sequence
  SARM1 targeting guide sequence portion
ggccucgcuggacccuggccgc

SEQ ID NO: 6504 - RNA, 22 nt, Artificial Sequence
  SARM1 targeting guide sequence portion
ggccuggacgcggugcuguauu

SEQ ID NO: 6505 - RNA, 22 nt, Artificial Sequence
  SARM1 targeting guide sequence portion
ggcgaagcggccaggguccagc

SEQ ID NO: 6506 - RNA, 22 nt, Artificial Sequence
  SARM1 targeting guide sequence portion
ggcgaaggaacgcgaacccgua

SEQ ID NO: 6507 - RNA, 22 nt, Artificial Sequence
  SARM1 targeting guide sequence portion
ggcgacuaacaaggagguggag

SEQ ID NO: 6508 - RNA, 22 nt, Artificial Sequence
  SARM1 targeting guide sequence portion
ggcgagcgggaagagccacucg

SEQ ID NO: 6509 - RNA, 22 nt, Artificial Sequence
  SARM1 targeting guide sequence portion
ggcgcagagguagaaagccccg

SEQ ID NO: 6510 - RNA, 22 nt, Artificial Sequence
  SARM1 targeting guide sequence portion
ggcgcagugcaucggggcuuuc

SEQ ID NO: 6511 - RNA, 22 nt, Artificial Sequence
  SARM1 targeting guide sequence portion
ggcgcgcauugggcugggcgug

SEQ ID NO: 6512 - RNA, 22 nt, Artificial Sequence
  SARM1 targeting guide sequence portion
ggcgcggagcguggcaggcauc

SEQ ID NO: 6513 - RNA, 22 nt, Artificial Sequence
  SARM1 targeting guide sequence portion
ggcgcucguggagccgcuugug

SEQ ID NO: 6514 - RNA, 22 nt, Artificial Sequence
  SARM1 targeting guide sequence portion
ggcgcugggcaacugcgcgcug

SEQ ID NO: 6515 - RNA, 22 nt, Artificial Sequence
  SARM1 targeting guide sequence portion
ggcggcaccaauacagcaccgc

SEQ ID NO: 6516 - RNA, 22 nt, Artificial Sequence
  SARM1 targeting guide sequence portion
ggcggccuggacgcggugcugu

SEQ ID NO: 6517 - RNA, 22 nt, Artificial Sequence
  SARM1 targeting guide sequence portion
ggcggugcagcgacgcauggua

SEQ ID NO: 6518 - RNA, 22 nt, Artificial Sequence
  SARM1 targeting guide sequence portion
ggcguccaccagacagcgggcg

SEQ ID NO: 6519 - RNA, 22 nt, Artificial Sequence
  SARM1 targeting guide sequence portion
ggcgugauccugaaccuggcga

SEQ ID NO: 6520 - RNA, 22 nt, Artificial Sequence
  SARM1 targeting guide sequence portion
ggcgugcagccgaagcagcucg

SEQ ID NO: 6521 - RNA, 22 nt, Artificial Sequence
  SARM1 targeting guide sequence portion
ggcuccacgagcgccagcgugc

SEQ ID NO: 6522 - RNA, 22 nt, Artificial Sequence
  SARM1 targeting guide sequence portion
ggcucuucccgcucgccuucuc

SEQ ID NO: 6523 - RNA, 22 nt, Artificial Sequence
  SARM1 targeting guide sequence portion
ggcucuugauggcagccucggc

SEQ ID NO: 6524 - RNA, 22 nt, Artificial Sequence
  SARM1 targeting guide sequence portion
ggcugcacgccugccucgcagu

SEQ ID NO: 6525 - RNA, 22 nt, Artificial Sequence
  SARM1 targeting guide sequence portion
ggcugccaucaagagccugcaa

SEQ ID NO: 6526 - RNA, 22 nt, Artificial Sequence
  SARM1 targeting guide sequence portion
ggcugcgcgcuucucuaccaug

SEQ ID NO: 6527 - RNA, 22 nt, Artificial Sequence
  SARM1 targeting guide sequence portion
ggcugggcgugauccugaaccu

SEQ ID NO: 6528 - RNA, 22 nt, Artificial Sequence
  SARM1 targeting guide sequence portion
ggcuugugucgcuggcguccac

SEQ ID NO: 6529 - RNA, 22 nt, Artificial Sequence
  SARM1 targeting guide sequence portion
ggcuuucuaccucugcgccgag

SEQ ID NO: 6530 - RNA, 22 nt, Artificial Sequence
  SARM1 targeting guide sequence portion
gggaagagccacucggcugcgc

SEQ ID NO: 6531 - RNA, 22 nt, Artificial Sequence
  SARM1 targeting guide sequence portion
gggcaacugcgcgcugcacggg

SEQ ID NO: 6532 - RNA, 22 nt, Artificial Sequence
  SARM1 targeting guide sequence portion
gggcacgcuggcgcucguggag

SEQ ID NO: 6533 - RNA, 22 nt, Artificial Sequence
  SARM1 targeting guide sequence portion
gggcagagaccgcguggcgcgc

SEQ ID NO: 6534 - RNA, 22 nt, Artificial Sequence
  SARM1 targeting guide sequence portion
gggccaggcggugcagcgacgc

SEQ ID NO: 6535 - RNA, 22 nt, Artificial Sequence
  SARM1 targeting guide sequence portion
gggcccgacgaccugcagcgcc

SEQ ID NO: 6536 - RNA, 22 nt, Artificial Sequence
  SARM1 targeting guide sequence portion
gggcccgcggcccuggcuugug

SEQ ID NO: 6537 - RNA, 22 nt, Artificial Sequence
  SARM1 targeting guide sequence portion
gggcgaagcggccaggguccag

SEQ ID NO: 6538 - RNA, 22 nt, Artificial Sequence
  SARM1 targeting guide sequence portion
gggcgugauccugaaccuggcg

SEQ ID NO: 6539 - RNA, 22 nt, Artificial Sequence
  SARM1 targeting guide sequence portion
gggcugggcgugauccugaacc

SEQ ID NO: 6540 - RNA, 22 nt, Artificial Sequence
  SARM1 targeting guide sequence portion
gggcuuucuaccucugcgccga

SEQ ID NO: 6541 - RNA, 22 nt, Artificial Sequence
  SARM1 targeting guide sequence portion
ggggccaggcggugcagcgacg

SEQ ID NO: 6542 - RNA, 22 nt, Artificial Sequence
  SARM1 targeting guide sequence portion
ggggcuuucuaccucugcgccg

SEQ ID NO: 6543 - RNA, 22 nt, Artificial Sequence
  SARM1 targeting guide sequence portion
gggggccaggcggugcagcgac

SEQ ID NO: 6544 - RNA, 22 nt, Artificial Sequence
  SARM1 targeting guide sequence portion
gggguccgugcggcggcaccaa

SEQ ID NO: 6545 - RNA, 22 nt, Artificial Sequence
  SARM1 targeting guide sequence portion
ggguccagcgaggccacaagcg

SEQ ID NO: 6546 - RNA, 22 nt, Artificial Sequence
  SARM1 targeting guide sequence portion
ggguccgugcggcggcaccaau

SEQ ID NO: 6547 - RNA, 22 nt, Artificial Sequence
  SARM1 targeting guide sequence portion
ggguucgcguuccuucgccagg

SEQ ID NO: 6548 - RNA, 22 nt, Artificial Sequence
  SARM1 targeting guide sequence portion
gguagaaagccccgaugcacug

SEQ ID NO: 6549 - RNA, 22 nt, Artificial Sequence
  SARM1 targeting guide sequence portion
gguagagaagcgcgcagccgag

SEQ ID NO: 6550 - RNA, 22 nt, Artificial Sequence
  SARM1 targeting guide sequence portion
gguccagcgaggccacaagcgg

SEQ ID NO: 6551 - RNA, 22 nt, Artificial Sequence
  SARM1 targeting guide sequence portion
gguccgugcggcggcaccaaua

SEQ ID NO: 6552 - RNA, 22 nt, Artificial Sequence
  SARM1 targeting guide sequence portion
ggucgucgggcccgcggcccug

SEQ ID NO: 6553 - RNA, 22 nt, Artificial Sequence
  SARM1 targeting guide sequence portion
ggucuugccuugcaggcucuug

SEQ ID NO: 6554 - RNA, 22 nt, Artificial Sequence
  SARM1 targeting guide sequence portion
ggugcagcgacgcaugguagag

SEQ ID NO: 6555 - RNA, 22 nt, Artificial Sequence
  SARM1 targeting guide sequence portion
ggugccgccgcacggaccccgc

SEQ ID NO: 6556 - RNA, 22 nt, Artificial Sequence
  SARM1 targeting guide sequence portion
ggugcuguauuggugccgccgc

SEQ ID NO: 6557 - RNA, 22 nt, Artificial Sequence
  SARM1 targeting guide sequence portion
gguggacgccagcgacacaagc

SEQ ID NO: 6558 - RNA, 22 nt, Artificial Sequence
  SARM1 targeting guide sequence portion
gguggagcgcgagguggagcgc

SEQ ID NO: 6559 - RNA, 22 nt, Artificial Sequence
  SARM1 targeting guide sequence portion
gguggagcgcucgggcacgcug

SEQ ID NO: 6560 - RNA, 22 nt, Artificial Sequence
  SARM1 targeting guide sequence portion
gguguuggcgacuaacaaggag

SEQ ID NO: 6561 - RNA, 22 nt, Artificial Sequence
  SARM1 targeting guide sequence portion
gguuagagucgagcaacggcac

SEQ ID NO: 6562 - RNA, 22 nt, Artificial Sequence
  SARM1 targeting guide sequence portion
gguucaggaucacgcccagccc

SEQ ID NO: 6563 - RNA, 22 nt, Artificial Sequence
  SARM1 targeting guide sequence portion
gguucgcguuccuucgccaggu

SEQ ID NO: 6564 - RNA, 22 nt, Artificial Sequence
  SARM1 targeting guide sequence portion
guagaaagccccgaugcacugc

SEQ ID NO: 6565 - RNA, 22 nt, Artificial Sequence
  SARM1 targeting guide sequence portion
guagagaagcgcgcagccgagu

SEQ ID NO: 6566 - RNA, 22 nt, Artificial Sequence
  SARM1 targeting guide sequence portion
guagagcuggcgcggagcgugg

SEQ ID NO: 6567 - RNA, 22 nt, Artificial Sequence
  SARM1 targeting guide sequence portion
guagcgguguuggcgacuaaca

SEQ ID NO: 6568 - RNA, 22 nt, Artificial Sequence
  SARM1 targeting guide sequence portion
guauuggugccgccgcacggac

SEQ ID NO: 6569 - RNA, 22 nt, Artificial Sequence
  SARM1 targeting guide sequence portion
guccaccagacagcgggcgaag

SEQ ID NO: 6570 - RNA, 22 nt, Artificial Sequence
  SARM1 targeting guide sequence portion
guccagcgaggccacaagcggc

SEQ ID NO: 6571 - RNA, 22 nt, Artificial Sequence
  SARM1 targeting guide sequence portion
guccaggccgccggccgccacc

SEQ ID NO: 6572 - RNA, 22 nt, Artificial Sequence
  SARM1 targeting guide sequence portion
guccgugcggcggcaccaauac

SEQ ID NO: 6573 - RNA, 22 nt, Artificial Sequence
  SARM1 targeting guide sequence portion
guccuccuuggagaaggcgagc

SEQ ID NO: 6574 - RNA, 22 nt, Artificial Sequence
  SARM1 targeting guide sequence portion
gucgagcaacggcacgaggcgc

SEQ ID NO: 6575 - RNA, 22 nt, Artificial Sequence
  SARM1 targeting guide sequence portion
gucgccaacaccgcuacugcga

SEQ ID NO: 6576 - RNA, 22 nt, Artificial Sequence
  SARM1 targeting guide sequence portion
gucgcugcaccgccuggccccc

SEQ ID NO: 6577 - RNA, 22 nt, Artificial Sequence
  SARM1 targeting guide sequence portion
gucgcuggcguccaccagacag

SEQ ID NO: 6578 - RNA, 22 nt, Artificial Sequence
  SARM1 targeting guide sequence portion
gucgggcccgcggcccuggcuu

SEQ ID NO: 6579 - RNA, 22 nt, Artificial Sequence
  SARM1 targeting guide sequence portion
gucgucgggcccgcggcccugg

SEQ ID NO: 6580 - RNA, 22 nt, Artificial Sequence
  SARM1 targeting guide sequence portion
gucuccuccgaaugcuugaaca

SEQ ID NO: 6581 - RNA, 22 nt, Artificial Sequence
  SARM1 targeting guide sequence portion
gucugguggacgccagcgacac

SEQ ID NO: 6582 - RNA, 22 nt, Artificial Sequence
  SARM1 targeting guide sequence portion
gucuugccuugcaggcucuuga

SEQ ID NO: 6583 - RNA, 22 nt, Artificial Sequence
  SARM1 targeting guide sequence portion
gugauccugaaccuggcgaagg

SEQ ID NO: 6584 - RNA, 22 nt, Artificial Sequence
  SARM1 targeting guide sequence portion
gugcagccgaagcagcucgucc

SEQ ID NO: 6585 - RNA, 22 nt, Artificial Sequence
  SARM1 targeting guide sequence portion
gugcagcgacgcaugguagaga

SEQ ID NO: 6586 - RNA, 22 nt, Artificial Sequence
  SARM1 targeting guide sequence portion
gugcagcgcgcaguugcccagc

SEQ ID NO: 6587 - RNA, 22 nt, Artificial Sequence
  SARM1 targeting guide sequence portion
gugcaucggggcuuucuaccuc

SEQ ID NO: 6588 - RNA, 22 nt, Artificial Sequence
  SARM1 targeting guide sequence portion
gugcccgagcgcuccaccucgc

SEQ ID NO: 6589 - RNA, 22 nt, Artificial Sequence
  SARM1 targeting guide sequence portion
gugccgccgcacggaccccgcg

SEQ ID NO: 6590 - RNA, 22 nt, Artificial Sequence
  SARM1 targeting guide sequence portion
gugccguugcucgacucuaacc

SEQ ID NO: 6591 - RNA, 22 nt, Artificial Sequence
  SARM1 targeting guide sequence portion
gugcggcggcaccaauacagca

SEQ ID NO: 6592 - RNA, 22 nt, Artificial Sequence
  SARM1 targeting guide sequence portion
gugcuccaagaugccugccacg

SEQ ID NO: 6593 - RNA, 22 nt, Artificial Sequence
  SARM1 targeting guide sequence portion
gugcuguauuggugccgccgca

SEQ ID NO: 6594 - RNA, 22 nt, Artificial Sequence
  SARM1 targeting guide sequence portion
guggacgccagcgacacaagcc

SEQ ID NO: 6595 - RNA, 22 nt, Artificial Sequence
  SARM1 targeting guide sequence portion
guggagccgcuuguggccucgc

SEQ ID NO: 6596 - RNA, 22 nt, Artificial Sequence
  SARM1 targeting guide sequence portion
guggagcgcgagguggagcgcu

SEQ ID NO: 6597 - RNA, 22 nt, Artificial Sequence
  SARM1 targeting guide sequence portion
guggagcgcucgggcacgcugg

SEQ ID NO: 6598 - RNA, 22 nt, Artificial Sequence
  SARM1 targeting guide sequence portion
guggcaggcaucuuggagcaca

SEQ ID NO: 6599 - RNA, 22 nt, Artificial Sequence
  SARM1 targeting guide sequence portion
guggccucgcuggacccuggcc

SEQ ID NO: 6600 - RNA, 22 nt, Artificial Sequence
  SARM1 targeting guide sequence portion
guggcgcagcagcgcggggucc

SEQ ID NO: 6601 - RNA, 22 nt, Artificial Sequence
  SARM1 targeting guide sequence portion
guggcgcgcauugggcugggcg

SEQ ID NO: 6602 - RNA, 22 nt, Artificial Sequence
  SARM1 targeting guide sequence portion
guggcucuucccgcucgccuuc

SEQ ID NO: 6603 - RNA, 22 nt, Artificial Sequence
  SARM1 targeting guide sequence portion
gugucgcuggcguccaccagac

SEQ ID NO: 6604 - RNA, 22 nt, Artificial Sequence
  SARM1 targeting guide sequence portion
guguuggcgacuaacaaggagg

SEQ ID NO: 6605 - RNA, 22 nt, Artificial Sequence
  SARM1 targeting guide sequence portion
guuagagucgagcaacggcacg

SEQ ID NO: 6606 - RNA, 22 nt, Artificial Sequence
  SARM1 targeting guide sequence portion
guuagucgccaacaccgcuacu

SEQ ID NO: 6607 - RNA, 22 nt, Artificial Sequence
  SARM1 targeting guide sequence portion
guucaagcauucggaggagaca

SEQ ID NO: 6608 - RNA, 22 nt, Artificial Sequence
  SARM1 targeting guide sequence portion
guucaggaucacgcccagccca

SEQ ID NO: 6609 - RNA, 22 nt, Artificial Sequence
  SARM1 targeting guide sequence portion
guuccuucgccagguucaggau

SEQ ID NO: 6610 - RNA, 22 nt, Artificial Sequence
  SARM1 targeting guide sequence portion
guucgcguuccuucgccagguu

SEQ ID NO: 6611 - RNA, 22 nt, Artificial Sequence
  SARM1 targeting guide sequence portion
guugcccagcgccagcgcgcag

SEQ ID NO: 6612 - RNA, 22 nt, Artificial Sequence
  SARM1 targeting guide sequence portion
guugcucgacucuaaccgcuug

SEQ ID NO: 6613 - RNA, 22 nt, Artificial Sequence
  SARM1 targeting guide sequence portion
guuggcgacuaacaaggaggug

SEQ ID NO: 6614 - RNA, 22 nt, Artificial Sequence
  SARM1 targeting guide sequence portion
uaacaaggagguggagcgcgag

SEQ ID NO: 6615 - RNA, 22 nt, Artificial Sequence
  SARM1 targeting guide sequence portion
uaaccgcuuggaggcgcagugc

SEQ ID NO: 6616 - RNA, 22 nt, Artificial Sequence
  SARM1 targeting guide sequence portion
uacagcaccgcguccaggccgc

SEQ ID NO: 6617 - RNA, 22 nt, Artificial Sequence
  SARM1 targeting guide sequence portion
uaccaugcgucgcugcaccgcc

SEQ ID NO: 6618 - RNA, 22 nt, Artificial Sequence
  SARM1 targeting guide sequence portion
uaccucugcgccgaggcugcca

SEQ ID NO: 6619 - RNA, 22 nt, Artificial Sequence
  SARM1 targeting guide sequence portion
uacggguucgcguuccuucgcc

SEQ ID NO: 6620 - RNA, 22 nt, Artificial Sequence
  SARM1 targeting guide sequence portion
uacugcgaggcaggcgugcagc

SEQ ID NO: 6621 - RNA, 22 nt, Artificial Sequence
  SARM1 targeting guide sequence portion
uagaaagccccgaugcacugcg

SEQ ID NO: 6622 - RNA, 22 nt, Artificial Sequence
  SARM1 targeting guide sequence portion
uagagaagcgcgcagccgagug

SEQ ID NO: 6623 - RNA, 22 nt, Artificial Sequence
  SARM1 targeting guide sequence portion
uagagcuggcgcggagcguggc

SEQ ID NO: 6624 - RNA, 22 nt, Artificial Sequence
  SARM1 targeting guide sequence portion
uagagucgagcaacggcacgag

SEQ ID NO: 6625 - RNA, 22 nt, Artificial Sequence
  SARM1 targeting guide sequence portion
uagcgguguuggcgacuaacaa

SEQ ID NO: 6626 - RNA, 22 nt, Artificial Sequence
  SARM1 targeting guide sequence portion
uagucgccaacaccgcuacugc

SEQ ID NO: 6627 - RNA, 22 nt, Artificial Sequence
  SARM1 targeting guide sequence portion
uauuggugccgccgcacggacc

SEQ ID NO: 6628 - RNA, 22 nt, Artificial Sequence
  SARM1 targeting guide sequence portion
ucaagagccugcaaggcaagac

SEQ ID NO: 6629 - RNA, 22 nt, Artificial Sequence
  SARM1 targeting guide sequence portion
ucaagcauucggaggagacaug

SEQ ID NO: 6630 - RNA, 22 nt, Artificial Sequence
  SARM1 targeting guide sequence portion
ucacgcccagcccaaugcgcgc

SEQ ID NO: 6631 - RNA, 22 nt, Artificial Sequence
  SARM1 targeting guide sequence portion
ucaggaucacgcccagcccaau

SEQ ID NO: 6632 - RNA, 22 nt, Artificial Sequence
  SARM1 targeting guide sequence portion
uccaagaugccugccacgcucc

SEQ ID NO: 6633 - RNA, 22 nt, Artificial Sequence
  SARM1 targeting guide sequence portion
uccaagcgguuagagucgagca

SEQ ID NO: 6634 - RNA, 22 nt, Artificial Sequence
  SARM1 targeting guide sequence portion
uccaaggaggacgagcugcuuc

SEQ ID NO: 6635 - RNA, 22 nt, Artificial Sequence
  SARM1 targeting guide sequence portion
uccaccagacagcgggcgaagc

SEQ ID NO: 6636 - RNA, 22 nt, Artificial Sequence
  SARM1 targeting guide sequence portion
uccaccuccuuguuagucgcca

SEQ ID NO: 6637 - RNA, 22 nt, Artificial Sequence
  SARM1 targeting guide sequence portion
uccaccucgcgcuccaccuccu

SEQ ID NO: 6638 - RNA, 22 nt, Artificial Sequence
  SARM1 targeting guide sequence portion
uccacgagcgccagcgugcccg

SEQ ID NO: 6639 - RNA, 22 nt, Artificial Sequence
  SARM1 targeting guide sequence portion
uccagcgaggccacaagcggcu

SEQ ID NO: 6640 - RNA, 22 nt, Artificial Sequence
  SARM1 targeting guide sequence portion
uccaggccgccggccgccacca

SEQ ID NO: 6641 - RNA, 22 nt, Artificial Sequence
  SARM1 targeting guide sequence portion
ucccgcucgccuucuccaagga

SEQ ID NO: 6642 - RNA, 22 nt, Artificial Sequence
  SARM1 targeting guide sequence portion
uccgaaugcuugaacaugugcu

SEQ ID NO: 6643 - RNA, 22 nt, Artificial Sequence
  SARM1 targeting guide sequence portion
uccgcgccagcucuacggguuc

SEQ ID NO: 6644 - RNA, 22 nt, Artificial Sequence
  SARM1 targeting guide sequence portion
uccgugcggcggcaccaauaca

SEQ ID NO: 6645 - RNA, 22 nt, Artificial Sequence
  SARM1 targeting guide sequence portion
uccuccgaaugcuugaacaugu

SEQ ID NO: 6646 - RNA, 22 nt, Artificial Sequence
  SARM1 targeting guide sequence portion
uccuccuuggagaaggcgagcg

SEQ ID NO: 6647 - RNA, 22 nt, Artificial Sequence
  SARM1 targeting guide sequence portion
uccugaaccuggcgaaggaacg

SEQ ID NO: 6648 - RNA, 22 nt, Artificial Sequence
  SARM1 targeting guide sequence portion
uccuucgccagguucaggauca

SEQ ID NO: 6649 - RNA, 22 nt, Artificial Sequence
  SARM1 targeting guide sequence portion
uccuuggagaaggcgagcggga

SEQ ID NO: 6650 - RNA, 22 nt, Artificial Sequence
  SARM1 targeting guide sequence portion
uccuuguuagucgccaacaccg

SEQ ID NO: 6651 - RNA, 22 nt, Artificial Sequence
  SARM1 targeting guide sequence portion
ucgacucuaaccgcuuggaggc

SEQ ID NO: 6652 - RNA, 22 nt, Artificial Sequence
  SARM1 targeting guide sequence portion
ucgagcaacggcacgaggcgcu

SEQ ID NO: 6653 - RNA, 22 nt, Artificial Sequence
  SARM1 targeting guide sequence portion
ucgcaguagcgguguuggcgac

SEQ ID NO: 6654 - RNA, 22 nt, Artificial Sequence
  SARM1 targeting guide sequence portion
ucgccaacaccgcuacugcgag

SEQ ID NO: 6655 - RNA, 22 nt, Artificial Sequence
  SARM1 targeting guide sequence portion
ucgccagguucaggaucacgcc

SEQ ID NO: 6656 - RNA, 22 nt, Artificial Sequence
  SARM1 targeting guide sequence portion
ucgcccgcugucugguggacgc

SEQ ID NO: 6657 - RNA, 22 nt, Artificial Sequence
  SARM1 targeting guide sequence portion
ucgccuucuccaaggaggacga

SEQ ID NO: 6658 - RNA, 22 nt, Artificial Sequence
  SARM1 targeting guide sequence portion
ucgcgcuccaccuccuuguuag

SEQ ID NO: 6659 - RNA, 22 nt, Artificial Sequence
  SARM1 targeting guide sequence portion
ucgcguuccuucgccagguuca

SEQ ID NO: 6660 - RNA, 22 nt, Artificial Sequence
  SARM1 targeting guide sequence portion
ucgcugcaccgccuggcccccg

SEQ ID NO: 6661 - RNA, 22 nt, Artificial Sequence
  SARM1 targeting guide sequence portion
ucgcuggacccuggccgcuucg

SEQ ID NO: 6662 - RNA, 22 nt, Artificial Sequence
  SARM1 targeting guide sequence portion
ucgcuggcguccaccagacagc

SEQ ID NO: 6663 - RNA, 22 nt, Artificial Sequence
  SARM1 targeting guide sequence portion
ucggaggagacaugccagaggc

SEQ ID NO: 6664 - RNA, 22 nt, Artificial Sequence
  SARM1 targeting guide sequence portion
ucggcgcagagguagaaagccc

SEQ ID NO: 6665 - RNA, 22 nt, Artificial Sequence
  SARM1 targeting guide sequence portion
ucggcugcacgccugccucgca

SEQ ID NO: 6666 - RNA, 22 nt, Artificial Sequence
  SARM1 targeting guide sequence portion
ucggcugcgcgcuucucuacca

SEQ ID NO: 6667 - RNA, 22 nt, Artificial Sequence
  SARM1 targeting guide sequence portion
ucgggcacgcuggcgcucgugg

SEQ ID NO: 6668 - RNA, 22 nt, Artificial Sequence
  SARM1 targeting guide sequence portion
ucgggcccgcggcccuggcuug

SEQ ID NO: 6669 - RNA, 22 nt, Artificial Sequence
  SARM1 targeting guide sequence portion
ucggggcuuucuaccucugcgc

SEQ ID NO: 6670 - RNA, 22 nt, Artificial Sequence
  SARM1 targeting guide sequence portion
ucguccuccuuggagaaggcga

SEQ ID NO: 6671 - RNA, 22 nt, Artificial Sequence
  SARM1 targeting guide sequence portion
ucgucgggcccgcggcccuggc

SEQ ID NO: 6672 - RNA, 22 nt, Artificial Sequence
  SARM1 targeting guide sequence portion
ucgugccguugcucgacucuaa

SEQ ID NO: 6673 - RNA, 22 nt, Artificial Sequence
  SARM1 targeting guide sequence portion
ucguggagccgcuuguggccuc

SEQ ID NO: 6674 - RNA, 22 nt, Artificial Sequence
  SARM1 targeting guide sequence portion
ucuaaccgcuuggaggcgcagu

SEQ ID NO: 6675 - RNA, 22 nt, Artificial Sequence
  SARM1 targeting guide sequence portion
ucuaccaugcgucgcugcaccg

SEQ ID NO: 6676 - RNA, 22 nt, Artificial Sequence
  SARM1 targeting guide sequence portion
ucuaccucugcgccgaggcugc

SEQ ID NO: 6677 - RNA, 22 nt, Artificial Sequence
  SARM1 targeting guide sequence portion
ucuacggguucgcguuccuucg

SEQ ID NO: 6678 - RNA, 22 nt, Artificial Sequence
  SARM1 targeting guide sequence portion
ucuccaaggaggacgagcugcu

SEQ ID NO: 6679 - RNA, 22 nt, Artificial Sequence
  SARM1 targeting guide sequence portion
ucuccuccgaaugcuugaacau

SEQ ID NO: 6680 - RNA, 22 nt, Artificial Sequence
  SARM1 targeting guide sequence portion
ucucuaccaugcgucgcugcac

SEQ ID NO: 6681 - RNA, 22 nt, Artificial Sequence
  SARM1 targeting guide sequence portion
ucugcgccgaggcugccaucaa

SEQ ID NO: 6682 - RNA, 22 nt, Artificial Sequence
  SARM1 targeting guide sequence portion
ucuggcaugucuccuccgaaug

SEQ ID NO: 6683 - RNA, 22 nt, Artificial Sequence
  SARM1 targeting guide sequence portion
ucugguggacgccagcgacaca

SEQ ID NO: 6684 - RNA, 22 nt, Artificial Sequence
  SARM1 targeting guide sequence portion
ucuucccgcucgccuucuccaa

SEQ ID NO: 6685 - RNA, 22 nt, Artificial Sequence
  SARM1 targeting guide sequence portion
ucuugauggcagccucggcgca

SEQ ID NO: 6686 - RNA, 22 nt, Artificial Sequence
  SARM1 targeting guide sequence portion
ucuugccuugcaggcucuugau

SEQ ID NO: 6687 - RNA, 22 nt, Artificial Sequence
  SARM1 targeting guide sequence portion
ucuuggagcacauguucaagca

SEQ ID NO: 6688 - RNA, 22 nt, Artificial Sequence
  SARM1 targeting guide sequence portion
ugaacaugugcuccaagaugcc

SEQ ID NO: 6689 - RNA, 22 nt, Artificial Sequence
  SARM1 targeting guide sequence portion
ugaaccuggcgaaggaacgcga

SEQ ID NO: 6690 - RNA, 22 nt, Artificial Sequence
  SARM1 targeting guide sequence portion
ugauccugaaccuggcgaagga

SEQ ID NO: 6691 - RNA, 22 nt, Artificial Sequence
  SARM1 targeting guide sequence portion
ugauggcagccucggcgcagag

SEQ ID NO: 6692 - RNA, 22 nt, Artificial Sequence
  SARM1 targeting guide sequence portion
ugcaccgccuggcccccgugca

SEQ ID NO: 6693 - RNA, 22 nt, Artificial Sequence
  SARM1 targeting guide sequence portion
ugcacgccugccucgcaguagc

SEQ ID NO: 6694 - RNA, 22 nt, Artificial Sequence
  SARM1 targeting guide sequence portion
ugcacgggggccaggcggugca

SEQ ID NO: 6695 - RNA, 22 nt, Artificial Sequence
  SARM1 targeting guide sequence portion
ugcacugcgccuccaagcgguu

SEQ ID NO: 6696 - RNA, 22 nt, Artificial Sequence
  SARM1 targeting guide sequence portion
ugcagccgaagcagcucguccu

SEQ ID NO: 6697 - RNA, 22 nt, Artificial Sequence
  SARM1 targeting guide sequence portion
ugcagcgacgcaugguagagaa

SEQ ID NO: 6698 - RNA, 22 nt, Artificial Sequence
  SARM1 targeting guide sequence portion
ugcagcgccucgugccguugcu

SEQ ID NO: 6699 - RNA, 22 nt, Artificial Sequence
  SARM1 targeting guide sequence portion
ugcagcgcgcaguugcccagcg

SEQ ID NO: 6700 - RNA, 22 nt, Artificial Sequence
  SARM1 targeting guide sequence portion
ugcaggcucuugauggcagccu

SEQ ID NO: 6701 - RNA, 22 nt, Artificial Sequence
  SARM1 targeting guide sequence portion
ugcaggucgucgggcccgcggc

SEQ ID NO: 6702 - RNA, 22 nt, Artificial Sequence
  SARM1 targeting guide sequence portion
ugcaucggggcuuucuaccucu

SEQ ID NO: 6703 - RNA, 22 nt, Artificial Sequence
  SARM1 targeting guide sequence portion
ugccacgcuccgcgccagcucu

SEQ ID NO: 6704 - RNA, 22 nt, Artificial Sequence
  SARM1 targeting guide sequence portion
ugccagaggcugguggcggccg

SEQ ID NO: 6705 - RNA, 22 nt, Artificial Sequence
  SARM1 targeting guide sequence portion
ugccaucaagagccugcaaggc

SEQ ID NO: 6706 - RNA, 22 nt, Artificial Sequence
  SARM1 targeting guide sequence portion
ugcccagcgccagcgcgcagug

SEQ ID NO: 6707 - RNA, 22 nt, Artificial Sequence
  SARM1 targeting guide sequence portion
ugcccgagcgcuccaccucgcg

SEQ ID NO: 6708 - RNA, 22 nt, Artificial Sequence
  SARM1 targeting guide sequence portion
ugccgccgcacggaccccgcgc

SEQ ID NO: 6709 - RNA, 22 nt, Artificial Sequence
  SARM1 targeting guide sequence portion
ugccguugcucgacucuaaccg

SEQ ID NO: 6710 - RNA, 22 nt, Artificial Sequence
  SARM1 targeting guide sequence portion
ugccucgcaguagcgguguugg

SEQ ID NO: 6711 - RNA, 22 nt, Artificial Sequence
  SARM1 targeting guide sequence portion
ugccugccacgcuccgcgccag

SEQ ID NO: 6712 - RNA, 22 nt, Artificial Sequence
  SARM1 targeting guide sequence portion
ugccuugcaggcucuugauggc

SEQ ID NO: 6713 - RNA, 22 nt, Artificial Sequence
  SARM1 targeting guide sequence portion
ugcgaggcaggcgugcagccga

SEQ ID NO: 6714 - RNA, 22 nt, Artificial Sequence
  SARM1 targeting guide sequence portion
ugcgccacugcgcgcuggcgcu

SEQ ID NO: 6715 - RNA, 22 nt, Artificial Sequence
  SARM1 targeting guide sequence portion
ugcgccgaggcugccaucaaga

SEQ ID NO: 6716 - RNA, 22 nt, Artificial Sequence
  SARM1 targeting guide sequence portion
ugcgccuccaagcgguuagagu

SEQ ID NO: 6717 - RNA, 22 nt, Artificial Sequence
  SARM1 targeting guide sequence portion
ugcgcgcugcacgggggccagg

SEQ ID NO: 6718 - RNA, 22 nt, Artificial Sequence
  SARM1 targeting guide sequence portion
ugcgcgcuggcgcugggcaacu

SEQ ID NO: 6719 - RNA, 22 nt, Artificial Sequence
  SARM1 targeting guide sequence portion
ugcgcgcuucucuaccaugcgu

SEQ ID NO: 6720 - RNA, 22 nt, Artificial Sequence
  SARM1 targeting guide sequence portion
ugcggcggcaccaauacagcac

SEQ ID NO: 6721 - RNA, 22 nt, Artificial Sequence
  SARM1 targeting guide sequence portion
ugcgucgcugcaccgccuggcc

SEQ ID NO: 6722 - RNA, 22 nt, Artificial Sequence
  SARM1 targeting guide sequence portion
ugcuccaagaugccugccacgc

SEQ ID NO: 6723 - RNA, 22 nt, Artificial Sequence
  SARM1 targeting guide sequence portion
ugcucgacucuaaccgcuugga

SEQ ID NO: 6724 - RNA, 22 nt, Artificial Sequence
  SARM1 targeting guide sequence portion
ugcugcgccacugcgcgcuggc

SEQ ID NO: 6725 - RNA, 22 nt, Artificial Sequence
  SARM1 targeting guide sequence portion
ugcuguauuggugccgccgcac

SEQ ID NO: 6726 - RNA, 22 nt, Artificial Sequence
  SARM1 targeting guide sequence portion
ugcuucggcugcacgccugccu

SEQ ID NO: 6727 - RNA, 22 nt, Artificial Sequence
  SARM1 targeting guide sequence portion
ugcuugaacaugugcuccaaga

SEQ ID NO: 6728 - RNA, 22 nt, Artificial Sequence
  SARM1 targeting guide sequence portion
uggacccuggccgcuucgcccg

SEQ ID NO: 6729 - RNA, 22 nt, Artificial Sequence
  SARM1 targeting guide sequence portion
uggacgccagcgacacaagcca

SEQ ID NO: 6730 - RNA, 22 nt, Artificial Sequence
  SARM1 targeting guide sequence portion
uggacgcggugcuguauuggug

SEQ ID NO: 6731 - RNA, 22 nt, Artificial Sequence
  SARM1 targeting guide sequence portion
uggagaaggcgagcgggaagag

SEQ ID NO: 6732 - RNA, 22 nt, Artificial Sequence
  SARM1 targeting guide sequence portion
uggagcacauguucaagcauuc

SEQ ID NO: 6733 - RNA, 22 nt, Artificial Sequence
  SARM1 targeting guide sequence portion
uggagccgcuuguggccucgcu

SEQ ID NO: 6734 - RNA, 22 nt, Artificial Sequence
  SARM1 targeting guide sequence portion
uggagcgcgagguggagcgcuc

SEQ ID NO: 6735 - RNA, 22 nt, Artificial Sequence
  SARM1 targeting guide sequence portion
uggagcgcucgggcacgcuggc

SEQ ID NO: 6736 - RNA, 22 nt, Artificial Sequence
  SARM1 targeting guide sequence portion
uggaggcgcagugcaucggggc

SEQ ID NO: 6737 - RNA, 22 nt, Artificial Sequence
  SARM1 targeting guide sequence portion
uggcagccucggcgcagaggua

SEQ ID NO: 6738 - RNA, 22 nt, Artificial Sequence
  SARM1 targeting guide sequence portion
uggcaggcaucuuggagcacau

SEQ ID NO: 6739 - RNA, 22 nt, Artificial Sequence
  SARM1 targeting guide sequence portion
uggcaugucuccuccgaaugcu

SEQ ID NO: 6740 - RNA, 22 nt, Artificial Sequence
  SARM1 targeting guide sequence portion
uggcccccgugcagcgcgcagu

SEQ ID NO: 6741 - RNA, 22 nt, Artificial Sequence
  SARM1 targeting guide sequence portion
uggccgcuucgcccgcugucug

SEQ ID NO: 6742 - RNA, 22 nt, Artificial Sequence
  SARM1 targeting guide sequence portion
uggccucgcuggacccuggccg

SEQ ID NO: 6743 - RNA, 22 nt, Artificial Sequence
  SARM1 targeting guide sequence portion
uggcgaaggaacgcgaacccgu

SEQ ID NO: 6744 - RNA, 22 nt, Artificial Sequence
  SARM1 targeting guide sequence portion
uggcgacuaacaaggaggugga

SEQ ID NO: 6745 - RNA, 22 nt, Artificial Sequence
  SARM1 targeting guide sequence portion
uggcgcagcagcgcgggguccg

SEQ ID NO: 6746 - RNA, 22 nt, Artificial Sequence
  SARM1 targeting guide sequence portion
uggcgcgcauugggcugggcgu

SEQ ID NO: 6747 - RNA, 22 nt, Artificial Sequence
  SARM1 targeting guide sequence portion
uggcgcggagcguggcaggcau

SEQ ID NO: 6748 - RNA, 22 nt, Artificial Sequence
  SARM1 targeting guide sequence portion
uggcgcucguggagccgcuugu

SEQ ID NO: 6749 - RNA, 22 nt, Artificial Sequence
  SARM1 targeting guide sequence portion
uggcgcugggcaacugcgcgcu

SEQ ID NO: 6750 - RNA, 22 nt, Artificial Sequence
  SARM1 targeting guide sequence portion
uggcggccggcggccuggacgc

SEQ ID NO: 6751 - RNA, 22 nt, Artificial Sequence
  SARM1 targeting guide sequence portion
uggcguccaccagacagcgggc

SEQ ID NO: 6752 - RNA, 22 nt, Artificial Sequence
  SARM1 targeting guide sequence portion
uggcucuucccgcucgccuucu

SEQ ID NO: 6753 - RNA, 22 nt, Artificial Sequence
  SARM1 targeting guide sequence portion
uggcuugugucgcuggcgucca

SEQ ID NO: 6754 - RNA, 22 nt, Artificial Sequence
  SARM1 targeting guide sequence portion
ugggcaacugcgcgcugcacgg

SEQ ID NO: 6755 - RNA, 22 nt, Artificial Sequence
  SARM1 targeting guide sequence portion
ugggcagagaccgcguggcgcg

SEQ ID NO: 6756 - RNA, 22 nt, Artificial Sequence
  SARM1 targeting guide sequence portion
ugggcgugauccugaaccuggc

SEQ ID NO: 6757 - RNA, 22 nt, Artificial Sequence
  SARM1 targeting guide sequence portion
ugggcugggcgugauccugaac

SEQ ID NO: 6758 - RNA, 22 nt, Artificial Sequence
  SARM1 targeting guide sequence portion
ugguagagaagcgcgcagccga

SEQ ID NO: 6759 - RNA, 22 nt, Artificial Sequence
  SARM1 targeting guide sequence portion
uggucuugccuugcaggcucuu

SEQ ID NO: 6760 - RNA, 22 nt, Artificial Sequence
  SARM1 targeting guide sequence portion
uggugccgccgcacggaccccg

SEQ ID NO: 6761 - RNA, 22 nt, Artificial Sequence
  SARM1 targeting guide sequence portion
ugguggacgccagcgacacaag

SEQ ID NO: 6762 - RNA, 22 nt, Artificial Sequence
  SARM1 targeting guide sequence portion
ugguggcggccggcggccugga

SEQ ID NO: 6763 - RNA, 22 nt, Artificial Sequence
  SARM1 targeting guide sequence portion
uguauuggugccgccgcacgga

SEQ ID NO: 6764 - RNA, 22 nt, Artificial Sequence
  SARM1 targeting guide sequence portion
ugucgcuggcguccaccagaca

SEQ ID NO: 6765 - RNA, 22 nt, Artificial Sequence
  SARM1 targeting guide sequence portion
ugucuccuccgaaugcuugaac

SEQ ID NO: 6766 - RNA, 22 nt, Artificial Sequence
  SARM1 targeting guide sequence portion
ugucugguggacgccagcgaca

SEQ ID NO: 6767 - RNA, 22 nt, Artificial Sequence
  SARM1 targeting guide sequence portion
ugugcuccaagaugccugccac

SEQ ID NO: 6768 - RNA, 22 nt, Artificial Sequence
  SARM1 targeting guide sequence portion
uguggccucgcuggacccuggc

SEQ ID NO: 6769 - RNA, 22 nt, Artificial Sequence
  SARM1 targeting guide sequence portion
ugugucgcuggcguccaccaga

SEQ ID NO: 6770 - RNA, 22 nt, Artificial Sequence
  SARM1 targeting guide sequence portion
uguuagucgccaacaccgcuac

SEQ ID NO: 6771 - RNA, 22 nt, Artificial Sequence
  SARM1 targeting guide sequence portion
uguucaagcauucggaggagac

SEQ ID NO: 6772 - RNA, 22 nt, Artificial Sequence
  SARM1 targeting guide sequence portion
uguuggcgacuaacaaggaggu

SEQ ID NO: 6773 - RNA, 22 nt, Artificial Sequence
  SARM1 targeting guide sequence portion
uuagagucgagcaacggcacga

SEQ ID NO: 6774 - RNA, 22 nt, Artificial Sequence
  SARM1 targeting guide sequence portion
uuagucgccaacaccgcuacug

SEQ ID NO: 6775 - RNA, 22 nt, Artificial Sequence
  SARM1 targeting guide sequence portion
uucaagcauucggaggagacau

SEQ ID NO: 6776 - RNA, 22 nt, Artificial Sequence
  SARM1 targeting guide sequence portion
uucaggaucacgcccagcccaa

SEQ ID NO: 6777 - RNA, 22 nt, Artificial Sequence
  SARM1 targeting guide sequence portion
uucccgcucgccuucuccaagg

SEQ ID NO: 6778 - RNA, 22 nt, Artificial Sequence
  SARM1 targeting guide sequence portion
uuccuucgccagguucaggauc

SEQ ID NO: 6779 - RNA, 22 nt, Artificial Sequence
  SARM1 targeting guide sequence portion
uucgccagguucaggaucacgc

SEQ ID NO: 6780 - RNA, 22 nt, Artificial Sequence
  SARM1 targeting guide sequence portion
uucgcccgcugucugguggacg

SEQ ID NO: 6781 - RNA, 22 nt, Artificial Sequence
  SARM1 targeting guide sequence portion
uucgcguuccuucgccagguuc

SEQ ID NO: 6782 - RNA, 22 nt, Artificial Sequence
  SARM1 targeting guide sequence portion
uucggaggagacaugccagagg

SEQ ID NO: 6783 - RNA, 22 nt, Artificial Sequence
  SARM1 targeting guide sequence portion
uucggcugcacgccugccucgc

SEQ ID NO: 6784 - RNA, 22 nt, Artificial Sequence
  SARM1 targeting guide sequence portion
uucuaccucugcgccgaggcug

SEQ ID NO: 6785 - RNA, 22 nt, Artificial Sequence
  SARM1 targeting guide sequence portion
uucuccaaggaggacgagcugc

SEQ ID NO: 6786 - RNA, 22 nt, Artificial Sequence
  SARM1 targeting guide sequence portion
uucucuaccaugcgucgcugca

SEQ ID NO: 6787 - RNA, 22 nt, Artificial Sequence
  SARM1 targeting guide sequence portion
uugaacaugugcuccaagaugc

SEQ ID NO: 6788 - RNA, 22 nt, Artificial Sequence
  SARM1 targeting guide sequence portion
uugauggcagccucggcgcaga

SEQ ID NO: 6789 - RNA, 22 nt, Artificial Sequence
  SARM1 targeting guide sequence portion
uugcaggcucuugauggcagcc

SEQ ID NO: 6790 - RNA, 22 nt, Artificial Sequence
  SARM1 targeting guide sequence portion
uugcccagcgccagcgcgcagu

SEQ ID NO: 6791 - RNA, 22 nt, Artificial Sequence
  SARM1 targeting guide sequence portion
uugccuugcaggcucuugaugg

SEQ ID NO: 6792 - RNA, 22 nt, Artificial Sequence
  SARM1 targeting guide sequence portion
uugcucgacucuaaccgcuugg

SEQ ID NO: 6793 - RNA, 22 nt, Artificial Sequence
  SARM1 targeting guide sequence portion
uuggagaaggcgagcgggaaga

SEQ ID NO: 6794 - RNA, 22 nt, Artificial Sequence
  SARM1 targeting guide sequence portion
uuggagcacauguucaagcauu

SEQ ID NO: 6795 - RNA, 22 nt, Artificial Sequence
  SARM1 targeting guide sequence portion
uuggaggcgcagugcaucgggg

SEQ ID NO: 6796 - RNA, 22 nt, Artificial Sequence
  SARM1 targeting guide sequence portion
uuggcgacuaacaaggaggugg

SEQ ID NO: 6797 - RNA, 22 nt, Artificial Sequence
  SARM1 targeting guide sequence portion
uugggcugggcgugauccugaa

SEQ ID NO: 6798 - RNA, 22 nt, Artificial Sequence
  SARM1 targeting guide sequence portion
uuggucuugccuugcaggcucu

SEQ ID NO: 6799 - RNA, 22 nt, Artificial Sequence
  SARM1 targeting guide sequence portion
uuggugccgccgcacggacccc

SEQ ID NO: 6800 - RNA, 22 nt, Artificial Sequence
  SARM1 targeting guide sequence portion
uuguggccucgcuggacccugg

SEQ ID NO: 6801 - RNA, 22 nt, Artificial Sequence
  SARM1 targeting guide sequence portion
uugugucgcuggcguccaccag

SEQ ID NO: 6802 - RNA, 22 nt, Artificial Sequence
  SARM1 targeting guide sequence portion
uuguuagucgccaacaccgcua

SEQ ID NO: 6803 - RNA, 22 nt, Artificial Sequence
  SARM1 targeting guide sequence portion
uuucuaccucugcgccgaggcu

SEQ ID NO: 6804 - RNA, 20 nt, Artificial Sequence
  SARM1 targeting guide sequence portion
aaaccaggcguuucaggcuc

SEQ ID NO: 6805 - RNA, 20 nt, Artificial Sequence
  SARM1 targeting guide sequence portion
aaaccgaucugcugcagcca

SEQ ID NO: 6806 - RNA, 20 nt, Artificial Sequence
  SARM1 targeting guide sequence portion
aaacgccugguuuccuacuc

SEQ ID NO: 6807 - RNA, 20 nt, Artificial Sequence
  SARM1 targeting guide sequence portion
aaccaggcguuucaggcucu

SEQ ID NO: 6808 - RNA, 20 nt, Artificial Sequence
  SARM1 targeting guide sequence portion
aaccgaucugcugcagccac

SEQ ID NO: 6809 - RNA, 20 nt, Artificial Sequence
  SARM1 targeting guide sequence portion
aaccucggccuccuuccagc

SEQ ID NO: 6810 - RNA, 20 nt, Artificial Sequence
  SARM1 targeting guide sequence portion
aacgccugguuuccuacucu

SEQ ID NO: 6811 - RNA, 20 nt, Artificial Sequence
  SARM1 targeting guide sequence portion
aagcgcgcgcugcgccugcu

SEQ ID NO: 6812 - RNA, 20 nt, Artificial Sequence
  SARM1 targeting guide sequence portion
aagcucucgcaguacuugga

SEQ ID NO: 6813 - RNA, 20 nt, Artificial Sequence
  SARM1 targeting guide sequence portion
aaggaggccgagguucagac

SEQ ID NO: 6814 - RNA, 20 nt, Artificial Sequence
  SARM1 targeting guide sequence portion
aaguacugcgagagcuuccg

SEQ ID NO: 6815 - RNA, 20 nt, Artificial Sequence
  SARM1 targeting guide sequence portion
aagucggcgcuggccaagcg

SEQ ID NO: 6816 - RNA, 20 nt, Artificial Sequence
  SARM1 targeting guide sequence portion
aauggcacuaagucggcgcu

SEQ ID NO: 6817 - RNA, 20 nt, Artificial Sequence
  SARM1 targeting guide sequence portion
acaucggcgccauccagagc

SEQ ID NO: 6818 - RNA, 20 nt, Artificial Sequence
  SARM1 targeting guide sequence portion
accaauggcacuaagucggc

SEQ ID NO: 6819 - RNA, 20 nt, Artificial Sequence
  SARM1 targeting guide sequence portion
accaggcguuucaggcucug

SEQ ID NO: 6820 - RNA, 20 nt, Artificial Sequence
  SARM1 targeting guide sequence portion
acccggaagcucucgcagua

SEQ ID NO: 6821 - RNA, 20 nt, Artificial Sequence
  SARM1 targeting guide sequence portion
accgaucugcugcagccacg

SEQ ID NO: 6822 - RNA, 20 nt, Artificial Sequence
  SARM1 targeting guide sequence portion
accuccucgcccagcaggcg

SEQ ID NO: 6823 - RNA, 20 nt, Artificial Sequence
  SARM1 targeting guide sequence portion
accucggccuccuuccagcu

SEQ ID NO: 6824 - RNA, 20 nt, Artificial Sequence
  SARM1 targeting guide sequence portion
acgccugguuuccuacucua

SEQ ID NO: 6825 - RNA, 20 nt, Artificial Sequence
  SARM1 targeting guide sequence portion
acggagggcaggaugggccg

SEQ ID NO: 6826 - RNA, 20 nt, Artificial Sequence
  SARM1 targeting guide sequence portion
acggcccauccugcccuccg

SEQ ID NO: 6827 - RNA, 20 nt, Artificial Sequence
  SARM1 targeting guide sequence portion
acgucugaaccucggccucc

SEQ ID NO: 6828 - RNA, 20 nt, Artificial Sequence
  SARM1 targeting guide sequence portion
acguggcugcagcagaucgg

SEQ ID NO: 6829 - RNA, 20 nt, Artificial Sequence
  SARM1 targeting guide sequence portion
acuaagucggcgcuggccaa

SEQ ID NO: 6830 - RNA, 20 nt, Artificial Sequence
  SARM1 targeting guide sequence portion
acucuaccaauggcacuaag

SEQ ID NO: 6831 - RNA, 20 nt, Artificial Sequence
  SARM1 targeting guide sequence portion
acucuacccggaagcucucg

SEQ ID NO: 6832 - RNA, 20 nt, Artificial Sequence
  SARM1 targeting guide sequence portion
acuuagugccauugguagag

SEQ ID NO: 6833 - RNA, 20 nt, Artificial Sequence
  SARM1 targeting guide sequence portion
acuuggagaaaccgaucugc

SEQ ID NO: 6834 - RNA, 20 nt, Artificial Sequence
  SARM1 targeting guide sequence portion
agaaaccgaucugcugcagc

SEQ ID NO: 6835 - RNA, 20 nt, Artificial Sequence
  SARM1 targeting guide sequence portion
agacguggcugcagcagauc

SEQ ID NO: 6836 - RNA, 20 nt, Artificial Sequence
  SARM1 targeting guide sequence portion
agagccugaaacgccugguu

SEQ ID NO: 6837 - RNA, 20 nt, Artificial Sequence
  SARM1 targeting guide sequence portion
agaguaggaaaccaggcguu

SEQ ID NO: 6838 - RNA, 20 nt, Artificial Sequence
  SARM1 targeting guide sequence portion
agaucgguuucuccaaguac

SEQ ID NO: 6839 - RNA, 20 nt, Artificial Sequence
  SARM1 targeting guide sequence portion
agcagaucgguuucuccaag

SEQ ID NO: 6840 - RNA, 20 nt, Artificial Sequence
  SARM1 targeting guide sequence portion
agcaggcgcagcgcgcgcuu

SEQ ID NO: 6841 - RNA, 20 nt, Artificial Sequence
  SARM1 targeting guide sequence portion
agccacgucugaaccucggc

SEQ ID NO: 6842 - RNA, 20 nt, Artificial Sequence
  SARM1 targeting guide sequence portion
agccugaaacgccugguuuc

SEQ ID NO: 6843 - RNA, 20 nt, Artificial Sequence
  SARM1 targeting guide sequence portion
agcgacaucggcgccaucca

SEQ ID NO: 6844 - RNA, 20 nt, Artificial Sequence
  SARM1 targeting guide sequence portion
agcgccgacuuagugccauu

SEQ ID NO: 6845 - RNA, 20 nt, Artificial Sequence
  SARM1 targeting guide sequence portion
agcgcgcgcugcgccugcug

SEQ ID NO: 6846 - RNA, 20 nt, Artificial Sequence
  SARM1 targeting guide sequence portion
agcgcgcgcuuggccagcgc

SEQ ID NO: 6847 - RNA, 20 nt, Artificial Sequence
  SARM1 targeting guide sequence portion
agcucucgcaguacuuggag

SEQ ID NO: 6848 - RNA, 20 nt, Artificial Sequence
  SARM1 targeting guide sequence portion
agcuggaaggaggccgaggu

SEQ ID NO: 6849 - RNA, 20 nt, Artificial Sequence
  SARM1 targeting guide sequence portion
agcugggcacggagggcagg

SEQ ID NO: 6850 - RNA, 20 nt, Artificial Sequence
  SARM1 targeting guide sequence portion
aggaaaccaggcguuucagg

SEQ ID NO: 6851 - RNA, 20 nt, Artificial Sequence
  SARM1 targeting guide sequence portion
aggaggccgagguucagacg

SEQ ID NO: 6852 - RNA, 20 nt, Artificial Sequence
  SARM1 targeting guide sequence portion
aggaggugccacggcccauc

SEQ ID NO: 6853 - RNA, 20 nt, Artificial Sequence
  SARM1 targeting guide sequence portion
aggaugggccguggcaccuc

SEQ ID NO: 6854 - RNA, 20 nt, Artificial Sequence
  SARM1 targeting guide sequence portion
aggccgagguucagacgugg

SEQ ID NO: 6855 - RNA, 20 nt, Artificial Sequence
  SARM1 targeting guide sequence portion
aggcgcagcgcgcgcuuggc

SEQ ID NO: 6856 - RNA, 20 nt, Artificial Sequence
  SARM1 targeting guide sequence portion
aggcguuucaggcucuggau

SEQ ID NO: 6857 - RNA, 20 nt, Artificial Sequence
  SARM1 targeting guide sequence portion
aggcucuggauggcgccgau

SEQ ID NO: 6858 - RNA, 20 nt, Artificial Sequence
  SARM1 targeting guide sequence portion
agggcaggaugggccguggc

SEQ ID NO: 6859 - RNA, 20 nt, Artificial Sequence
  SARM1 targeting guide sequence portion
aggugccacggcccauccug

SEQ ID NO: 6860 - RNA, 20 nt, Artificial Sequence
  SARM1 targeting guide sequence portion
agguguucagcgacaucggc

SEQ ID NO: 6861 - RNA, 20 nt, Artificial Sequence
  SARM1 targeting guide sequence portion
agguucagacguggcugcag

SEQ ID NO: 6862 - RNA, 20 nt, Artificial Sequence
  SARM1 targeting guide sequence portion
aguacugcgagagcuuccgg

SEQ ID NO: 6863 - RNA, 20 nt, Artificial Sequence
  SARM1 targeting guide sequence portion
aguacuuggagaaaccgauc

SEQ ID NO: 6864 - RNA, 20 nt, Artificial Sequence
  SARM1 targeting guide sequence portion
aguaggaaaccaggcguuuc

SEQ ID NO: 6865 - RNA, 20 nt, Artificial Sequence
  SARM1 targeting guide sequence portion
agucggcgcuggccaagcgc

SEQ ID NO: 6866 - RNA, 20 nt, Artificial Sequence
  SARM1 targeting guide sequence portion
agugccauugguagaguagg

SEQ ID NO: 6867 - RNA, 20 nt, Artificial Sequence
  SARM1 targeting guide sequence portion
auccagagccugaaacgccu

SEQ ID NO: 6868 - RNA, 20 nt, Artificial Sequence
  SARM1 targeting guide sequence portion
auccugcccuccgugcccag

SEQ ID NO: 6869 - RNA, 20 nt, Artificial Sequence
  SARM1 targeting guide sequence portion
aucggcgccauccagagccu

SEQ ID NO: 6870 - RNA, 20 nt, Artificial Sequence
  SARM1 targeting guide sequence portion
aucgguuucuccaaguacug

SEQ ID NO: 6871 - RNA, 20 nt, Artificial Sequence
  SARM1 targeting guide sequence portion
aucugcugcagccacgucug

SEQ ID NO: 6872 - RNA, 20 nt, Artificial Sequence
  SARM1 targeting guide sequence portion
auggcacuaagucggcgcug

SEQ ID NO: 6873 - RNA, 20 nt, Artificial Sequence
  SARM1 targeting guide sequence portion
auggcgccgaugucgcugaa

SEQ ID NO: 6874 - RNA, 20 nt, Artificial Sequence
  SARM1 targeting guide sequence portion
augggccguggcaccuccuc

SEQ ID NO: 6875 - RNA, 20 nt, Artificial Sequence
  SARM1 targeting guide sequence portion
auugguagaguaggaaacca

SEQ ID NO: 6876 - RNA, 20 nt, Artificial Sequence
  SARM1 targeting guide sequence portion
caagcgcgcgcugcgccugc

SEQ ID NO: 6877 - RNA, 20 nt, Artificial Sequence
  SARM1 targeting guide sequence portion
caaguacugcgagagcuucc

SEQ ID NO: 6878 - RNA, 20 nt, Artificial Sequence
  SARM1 targeting guide sequence portion
caauggcacuaagucggcgc

SEQ ID NO: 6879 - RNA, 20 nt, Artificial Sequence
  SARM1 targeting guide sequence portion
caccuccucgcccagcaggc

SEQ ID NO: 6880 - RNA, 20 nt, Artificial Sequence
  SARM1 targeting guide sequence portion
cacggagggcaggaugggcc

SEQ ID NO: 6881 - RNA, 20 nt, Artificial Sequence
  SARM1 targeting guide sequence portion
cacggcccauccugcccucc

SEQ ID NO: 6882 - RNA, 20 nt, Artificial Sequence
  SARM1 targeting guide sequence portion
cacgucugaaccucggccuc

SEQ ID NO: 6883 - RNA, 20 nt, Artificial Sequence
  SARM1 targeting guide sequence portion
cacuaagucggcgcuggcca

SEQ ID NO: 6884 - RNA, 20 nt, Artificial Sequence
  SARM1 targeting guide sequence portion
cagacguggcugcagcagau

SEQ ID NO: 6885 - RNA, 20 nt, Artificial Sequence
  SARM1 targeting guide sequence portion
cagagccugaaacgccuggu

SEQ ID NO: 6886 - RNA, 20 nt, Artificial Sequence
  SARM1 targeting guide sequence portion
cagaucgguuucuccaagua

SEQ ID NO: 6887 - RNA, 20 nt, Artificial Sequence
  SARM1 targeting guide sequence portion
cagcagaucgguuucuccaa

SEQ ID NO: 6888 - RNA, 20 nt, Artificial Sequence
  SARM1 targeting guide sequence portion
cagcaggcgcagcgcgcgcu

SEQ ID NO: 6889 - RNA, 20 nt, Artificial Sequence
  SARM1 targeting guide sequence portion
cagccacgucugaaccucgg

SEQ ID NO: 6890 - RNA, 20 nt, Artificial Sequence
  SARM1 targeting guide sequence portion
cagcgacaucggcgccaucc

SEQ ID NO: 6891 - RNA, 20 nt, Artificial Sequence
  SARM1 targeting guide sequence portion
cagcgccgacuuagugccau

SEQ ID NO: 6892 - RNA, 20 nt, Artificial Sequence
  SARM1 targeting guide sequence portion
cagcgcgcgcuuggccagcg

SEQ ID NO: 6893 - RNA, 20 nt, Artificial Sequence
  SARM1 targeting guide sequence portion
cagcuggaaggaggccgagg

SEQ ID NO: 6894 - RNA, 20 nt, Artificial Sequence
  SARM1 targeting guide sequence portion
cagcugggcacggagggcag

SEQ ID NO: 6895 - RNA, 20 nt, Artificial Sequence
  SARM1 targeting guide sequence portion
caggaugggccguggcaccu

SEQ ID NO: 6896 - RNA, 20 nt, Artificial Sequence
  SARM1 targeting guide sequence portion
caggcgcagcgcgcgcuugg

SEQ ID NO: 6897 - RNA, 20 nt, Artificial Sequence
  SARM1 targeting guide sequence portion
caggcguuucaggcucugga

SEQ ID NO: 6898 - RNA, 20 nt, Artificial Sequence
  SARM1 targeting guide sequence portion
caggcucuggauggcgccga

SEQ ID NO: 6899 - RNA, 20 nt, Artificial Sequence
  SARM1 targeting guide sequence portion
caguacuuggagaaaccgau

SEQ ID NO: 6900 - RNA, 20 nt, Artificial Sequence
  SARM1 targeting guide sequence portion
cauccagagccugaaacgcc

SEQ ID NO: 6901 - RNA, 20 nt, Artificial Sequence
  SARM1 targeting guide sequence portion
cauccugcccuccgugccca

SEQ ID NO: 6902 - RNA, 20 nt, Artificial Sequence
  SARM1 targeting guide sequence portion
caucggcgccauccagagcc

SEQ ID NO: 6903 - RNA, 20 nt, Artificial Sequence
  SARM1 targeting guide sequence portion
cauugguagaguaggaaacc

SEQ ID NO: 6904 - RNA, 20 nt, Artificial Sequence
  SARM1 targeting guide sequence portion
ccaagcgcgcgcugcgccug

SEQ ID NO: 6905 - RNA, 20 nt, Artificial Sequence
  SARM1 targeting guide sequence portion
ccaaguacugcgagagcuuc

SEQ ID NO: 6906 - RNA, 20 nt, Artificial Sequence
  SARM1 targeting guide sequence portion
ccaauggcacuaagucggcg

SEQ ID NO: 6907 - RNA, 20 nt, Artificial Sequence
  SARM1 targeting guide sequence portion
ccacggcccauccugcccuc

SEQ ID NO: 6908 - RNA, 20 nt, Artificial Sequence
  SARM1 targeting guide sequence portion
ccacgucugaaccucggccu

SEQ ID NO: 6909 - RNA, 20 nt, Artificial Sequence
  SARM1 targeting guide sequence portion
ccagagccugaaacgccugg

SEQ ID NO: 6910 - RNA, 20 nt, Artificial Sequence
  SARM1 targeting guide sequence portion
ccagcaggcgcagcgcgcgc

SEQ ID NO: 6911 - RNA, 20 nt, Artificial Sequence
  SARM1 targeting guide sequence portion
ccagcgccgacuuagugcca

SEQ ID NO: 6912 - RNA, 20 nt, Artificial Sequence
  SARM1 targeting guide sequence portion
ccagcuggaaggaggccgag

SEQ ID NO: 6913 - RNA, 20 nt, Artificial Sequence
  SARM1 targeting guide sequence portion
ccagcugggcacggagggca

SEQ ID NO: 6914 - RNA, 20 nt, Artificial Sequence
  SARM1 targeting guide sequence portion
ccaggcguuucaggcucugg

SEQ ID NO: 6915 - RNA, 20 nt, Artificial Sequence
  SARM1 targeting guide sequence portion
ccauccagagccugaaacgc

SEQ ID NO: 6916 - RNA, 20 nt, Artificial Sequence
  SARM1 targeting guide sequence portion
ccauccugcccuccgugccc

SEQ ID NO: 6917 - RNA, 20 nt, Artificial Sequence
  SARM1 targeting guide sequence portion
ccauugguagaguaggaaac

SEQ ID NO: 6918 - RNA, 20 nt, Artificial Sequence
  SARM1 targeting guide sequence portion
cccagcaggcgcagcgcgcg

SEQ ID NO: 6919 - RNA, 20 nt, Artificial Sequence
  SARM1 targeting guide sequence portion
cccagcuggaaggaggccga

SEQ ID NO: 6920 - RNA, 20 nt, Artificial Sequence
  SARM1 targeting guide sequence portion
cccauccugcccuccgugcc

SEQ ID NO: 6921 - RNA, 20 nt, Artificial Sequence
  SARM1 targeting guide sequence portion
cccggaagcucucgcaguac

SEQ ID NO: 6922 - RNA, 20 nt, Artificial Sequence
  SARM1 targeting guide sequence portion
cccuagguguucagcgacau

SEQ ID NO: 6923 - RNA, 20 nt, Artificial Sequence
  SARM1 targeting guide sequence portion
cccuccgugcccagcuggaa

SEQ ID NO: 6924 - RNA, 20 nt, Artificial Sequence
  SARM1 targeting guide sequence portion
ccgacuuagugccauuggua

SEQ ID NO: 6925 - RNA, 20 nt, Artificial Sequence
  SARM1 targeting guide sequence portion
ccgagguucagacguggcug

SEQ ID NO: 6926 - RNA, 20 nt, Artificial Sequence
  SARM1 targeting guide sequence portion
ccgaucugcugcagccacgu

SEQ ID NO: 6927 - RNA, 20 nt, Artificial Sequence
  SARM1 targeting guide sequence portion
ccggaagcucucgcaguacu

SEQ ID NO: 6928 - RNA, 20 nt, Artificial Sequence
  SARM1 targeting guide sequence portion
ccgugcccagcuggaaggag

SEQ ID NO: 6929 - RNA, 20 nt, Artificial Sequence
  SARM1 targeting guide sequence portion
ccguggcaccuccucgccca

SEQ ID NO: 6930 - RNA, 20 nt, Artificial Sequence
  SARM1 targeting guide sequence portion
ccuacucuaccaauggcacu

SEQ ID NO: 6931 - RNA, 20 nt, Artificial Sequence
  SARM1 targeting guide sequence portion
ccuagguguucagcgacauc

SEQ ID NO: 6932 - RNA, 20 nt, Artificial Sequence
  SARM1 targeting guide sequence portion
ccuccgugcccagcuggaag

SEQ ID NO: 6933 - RNA, 20 nt, Artificial Sequence
  SARM1 targeting guide sequence portion
ccuccucgcccagcaggcgc

SEQ ID NO: 6934 - RNA, 20 nt, Artificial Sequence
  SARM1 targeting guide sequence portion
ccuccuuccagcugggcacg

SEQ ID NO: 6935 - RNA, 20 nt, Artificial Sequence
  SARM1 targeting guide sequence portion
ccucgcccagcaggcgcagc

SEQ ID NO: 6936 - RNA, 20 nt, Artificial Sequence
  SARM1 targeting guide sequence portion
ccucggccuccuuccagcug

SEQ ID NO: 6937 - RNA, 20 nt, Artificial Sequence
  SARM1 targeting guide sequence portion
ccugaaacgccugguuuccu

SEQ ID NO: 6938 - RNA, 20 nt, Artificial Sequence
  SARM1 targeting guide sequence portion
ccugcccuccgugcccagcu

SEQ ID NO: 6939 - RNA, 20 nt, Artificial Sequence
  SARM1 targeting guide sequence portion
ccugcugggcgaggaggugc

SEQ ID NO: 6940 - RNA, 20 nt, Artificial Sequence
  SARM1 targeting guide sequence portion
ccugguuuccuacucuacca

SEQ ID NO: 6941 - RNA, 20 nt, Artificial Sequence
  SARM1 targeting guide sequence portion
ccuuccagcugggcacggag

SEQ ID NO: 6942 - RNA, 20 nt, Artificial Sequence
  SARM1 targeting guide sequence portion
cgacaucggcgccauccaga

SEQ ID NO: 6943 - RNA, 20 nt, Artificial Sequence
  SARM1 targeting guide sequence portion
cgacuuagugccauugguag

SEQ ID NO: 6944 - RNA, 20 nt, Artificial Sequence
  SARM1 targeting guide sequence portion
cgaggaggugccacggccca

SEQ ID NO: 6945 - RNA, 20 nt, Artificial Sequence
  SARM1 targeting guide sequence portion
cgagguucagacguggcugc

SEQ ID NO: 6946 - RNA, 20 nt, Artificial Sequence
  SARM1 targeting guide sequence portion
cgaucugcugcagccacguc

SEQ ID NO: 6947 - RNA, 20 nt, Artificial Sequence
  SARM1 targeting guide sequence portion
cgcagcgcgcgcuuggccag

SEQ ID NO: 6948 - RNA, 20 nt, Artificial Sequence
  SARM1 targeting guide sequence portion
cgcaguacuuggagaaaccg

SEQ ID NO: 6949 - RNA, 20 nt, Artificial Sequence
  SARM1 targeting guide sequence portion
cgccauccagagccugaaac

SEQ ID NO: 6950 - RNA, 20 nt, Artificial Sequence
  SARM1 targeting guide sequence portion
cgcccagcaggcgcagcgcg

SEQ ID NO: 6951 - RNA, 20 nt, Artificial Sequence
  SARM1 targeting guide sequence portion
cgccgacuuagugccauugg

SEQ ID NO: 6952 - RNA, 20 nt, Artificial Sequence
  SARM1 targeting guide sequence portion
cgccgaugucgcugaacacc

SEQ ID NO: 6953 - RNA, 20 nt, Artificial Sequence
  SARM1 targeting guide sequence portion
cgccugcugggcgaggaggu

SEQ ID NO: 6954 - RNA, 20 nt, Artificial Sequence
  SARM1 targeting guide sequence portion
cgccugguuuccuacucuac

SEQ ID NO: 6955 - RNA, 20 nt, Artificial Sequence
  SARM1 targeting guide sequence portion
cgcgcgcugcgccugcuggg

SEQ ID NO: 6956 - RNA, 20 nt, Artificial Sequence
  SARM1 targeting guide sequence portion
cgcgcgcuuggccagcgccg

SEQ ID NO: 6957 - RNA, 20 nt, Artificial Sequence
  SARM1 targeting guide sequence portion
cgcgcugcgccugcugggcg

SEQ ID NO: 6958 - RNA, 20 nt, Artificial Sequence
  SARM1 targeting guide sequence portion
cgcgcuuggccagcgccgac

SEQ ID NO: 6959 - RNA, 20 nt, Artificial Sequence
  SARM1 targeting guide sequence portion
cgcugcgccugcugggcgag

SEQ ID NO: 6960 - RNA, 20 nt, Artificial Sequence
  SARM1 targeting guide sequence portion
cgcuggccaagcgcgcgcug

SEQ ID NO: 6961 - RNA, 20 nt, Artificial Sequence
  SARM1 targeting guide sequence portion
cgcuuggccagcgccgacuu

SEQ ID NO: 6962 - RNA, 20 nt, Artificial Sequence
  SARM1 targeting guide sequence portion
cggaagcucucgcaguacuu

SEQ ID NO: 6963 - RNA, 20 nt, Artificial Sequence
  SARM1 targeting guide sequence portion
cggagggcaggaugggccgu

SEQ ID NO: 6964 - RNA, 20 nt, Artificial Sequence
  SARM1 targeting guide sequence portion
cggcccauccugcccuccgu

SEQ ID NO: 6965 - RNA, 20 nt, Artificial Sequence
  SARM1 targeting guide sequence portion
cggccuccuuccagcugggc

SEQ ID NO: 6966 - RNA, 20 nt, Artificial Sequence
  SARM1 targeting guide sequence portion
cggcgccauccagagccuga

SEQ ID NO: 6967 - RNA, 20 nt, Artificial Sequence
  SARM1 targeting guide sequence portion
cggcgcuggccaagcgcgcg

SEQ ID NO: 6968 - RNA, 20 nt, Artificial Sequence
  SARM1 targeting guide sequence portion
cgguuucuccaaguacugcg

SEQ ID NO: 6969 - RNA, 20 nt, Artificial Sequence
  SARM1 targeting guide sequence portion
cgucugaaccucggccuccu

SEQ ID NO: 6970 - RNA, 20 nt, Artificial Sequence
  SARM1 targeting guide sequence portion
cgugcccagcuggaaggagg

SEQ ID NO: 6971 - RNA, 20 nt, Artificial Sequence
  SARM1 targeting guide sequence portion
cguggcaccuccucgcccag

SEQ ID NO: 6972 - RNA, 20 nt, Artificial Sequence
  SARM1 targeting guide sequence portion
cguggcugcagcagaucggu

SEQ ID NO: 6973 - RNA, 20 nt, Artificial Sequence
  SARM1 targeting guide sequence portion
cguuucaggcucuggauggc

SEQ ID NO: 6974 - RNA, 20 nt, Artificial Sequence
  SARM1 targeting guide sequence portion
cuaagucggcgcuggccaag

SEQ ID NO: 6975 - RNA, 20 nt, Artificial Sequence
  SARM1 targeting guide sequence portion
cuaccaauggcacuaagucg

SEQ ID NO: 6976 - RNA, 20 nt, Artificial Sequence
  SARM1 targeting guide sequence portion
cuacccggaagcucucgcag

SEQ ID NO: 6977 - RNA, 20 nt, Artificial Sequence
  SARM1 targeting guide sequence portion
cuacucuaccaauggcacua

SEQ ID NO: 6978 - RNA, 20 nt, Artificial Sequence
  SARM1 targeting guide sequence portion
cuagguguucagcgacaucg

SEQ ID NO: 6979 - RNA, 20 nt, Artificial Sequence
  SARM1 targeting guide sequence portion
cuccaaguacugcgagagcu

SEQ ID NO: 6980 - RNA, 20 nt, Artificial Sequence
  SARM1 targeting guide sequence portion
cuccgugcccagcuggaagg

SEQ ID NO: 6981 - RNA, 20 nt, Artificial Sequence
  SARM1 targeting guide sequence portion
cuccucgcccagcaggcgca

SEQ ID NO: 6982 - RNA, 20 nt, Artificial Sequence
  SARM1 targeting guide sequence portion
cuccuuccagcugggcacgg

SEQ ID NO: 6983 - RNA, 20 nt, Artificial Sequence
  SARM1 targeting guide sequence portion
cucgcaguacuuggagaaac

SEQ ID NO: 6984 - RNA, 20 nt, Artificial Sequence
  SARM1 targeting guide sequence portion
cucgcccagcaggcgcagcg

SEQ ID NO: 6985 - RNA, 20 nt, Artificial Sequence
  SARM1 targeting guide sequence portion
cucggccuccuuccagcugg

SEQ ID NO: 6986 - RNA, 20 nt, Artificial Sequence
  SARM1 targeting guide sequence portion
cucuaccaauggcacuaagu

SEQ ID NO: 6987 - RNA, 20 nt, Artificial Sequence
  SARM1 targeting guide sequence portion
cucuacccggaagcucucgc

SEQ ID NO: 6988 - RNA, 20 nt, Artificial Sequence
  SARM1 targeting guide sequence portion
cucucgcaguacuuggagaa

SEQ ID NO: 6989 - RNA, 20 nt, Artificial Sequence
  SARM1 targeting guide sequence portion
cucuggauggcgccgauguc

SEQ ID NO: 6990 - RNA, 20 nt, Artificial Sequence
  SARM1 targeting guide sequence portion
cugaaacgccugguuuccua

SEQ ID NO: 6991 - RNA, 20 nt, Artificial Sequence
  SARM1 targeting guide sequence portion
cugaaccucggccuccuucc

SEQ ID NO: 6992 - RNA, 20 nt, Artificial Sequence
  SARM1 targeting guide sequence portion
cugcagcagaucgguuucuc

SEQ ID NO: 6993 - RNA, 20 nt, Artificial Sequence
  SARM1 targeting guide sequence portion
cugcagccacgucugaaccu

SEQ ID NO: 6994 - RNA, 20 nt, Artificial Sequence
  SARM1 targeting guide sequence portion
cugcccuccgugcccagcug

SEQ ID NO: 6995 - RNA, 20 nt, Artificial Sequence
  SARM1 targeting guide sequence portion
cugcgccugcugggcgagga

SEQ ID NO: 6996 - RNA, 20 nt, Artificial Sequence
  SARM1 targeting guide sequence portion
cugcugcagccacgucugaa

SEQ ID NO: 6997 - RNA, 20 nt, Artificial Sequence
  SARM1 targeting guide sequence portion
cugcugggcgaggaggugcc

SEQ ID NO: 6998 - RNA, 20 nt, Artificial Sequence
  SARM1 targeting guide sequence portion
cuggaaggaggccgagguuc

SEQ ID NO: 6999 - RNA, 20 nt, Artificial Sequence
  SARM1 targeting guide sequence portion
cuggauggcgccgaugucgc

SEQ ID NO: 7000 - RNA, 20 nt, Artificial Sequence
  SARM1 targeting guide sequence portion
cuggccaagcgcgcgcugcg

SEQ ID NO: 7001 - RNA, 20 nt, Artificial Sequence
  SARM1 targeting guide sequence portion
cugggcacggagggcaggau

SEQ ID NO: 7002 - RNA, 20 nt, Artificial Sequence
  SARM1 targeting guide sequence portion
cugggcgaggaggugccacg

SEQ ID NO: 7003 - RNA, 20 nt, Artificial Sequence
  SARM1 targeting guide sequence portion
cugguuuccuacucuaccaa

SEQ ID NO: 7004 - RNA, 20 nt, Artificial Sequence
  SARM1 targeting guide sequence portion
cuuagugccauugguagagu

SEQ ID NO: 7005 - RNA, 20 nt, Artificial Sequence
  SARM1 targeting guide sequence portion
cuuccagcugggcacggagg

SEQ ID NO: 7006 - RNA, 20 nt, Artificial Sequence
  SARM1 targeting guide sequence portion
cuuggagaaaccgaucugcu

SEQ ID NO: 7007 - RNA, 20 nt, Artificial Sequence
  SARM1 targeting guide sequence portion
cuuggccagcgccgacuuag

SEQ ID NO: 7008 - RNA, 20 nt, Artificial Sequence
  SARM1 targeting guide sequence portion
gaaaccaggcguuucaggcu

SEQ ID NO: 7009 - RNA, 20 nt, Artificial Sequence
  SARM1 targeting guide sequence portion
gaaaccgaucugcugcagcc

SEQ ID NO: 7010 - RNA, 20 nt, Artificial Sequence
  SARM1 targeting guide sequence portion
gaaacgccugguuuccuacu

SEQ ID NO: 7011 - RNA, 20 nt, Artificial Sequence
  SARM1 targeting guide sequence portion
gaaccucggccuccuuccag

SEQ ID NO: 7012 - RNA, 20 nt, Artificial Sequence
  SARM1 targeting guide sequence portion
gaagcucucgcaguacuugg

SEQ ID NO: 7013 - RNA, 20 nt, Artificial Sequence
  SARM1 targeting guide sequence portion
gaaggaggccgagguucaga

SEQ ID NO: 7014 - RNA, 20 nt, Artificial Sequence
  SARM1 targeting guide sequence portion
gacaucggcgccauccagag

SEQ ID NO: 7015 - RNA, 20 nt, Artificial Sequence
  SARM1 targeting guide sequence portion
gacguggcugcagcagaucg

SEQ ID NO: 7016 - RNA, 20 nt, Artificial Sequence
  SARM1 targeting guide sequence portion
gacuuagugccauugguaga

SEQ ID NO: 7017 - RNA, 20 nt, Artificial Sequence
  SARM1 targeting guide sequence portion
gagaaaccgaucugcugcag

SEQ ID NO: 7018 - RNA, 20 nt, Artificial Sequence
  SARM1 targeting guide sequence portion
gagccugaaacgccugguuu

SEQ ID NO: 7019 - RNA, 20 nt, Artificial Sequence
  SARM1 targeting guide sequence portion
gaggaggugccacggcccau

SEQ ID NO: 7020 - RNA, 20 nt, Artificial Sequence
  SARM1 targeting guide sequence portion
gaggccgagguucagacgug

SEQ ID NO: 7021 - RNA, 20 nt, Artificial Sequence
  SARM1 targeting guide sequence portion
gagggcaggaugggccgugg

SEQ ID NO: 7022 - RNA, 20 nt, Artificial Sequence
  SARM1 targeting guide sequence portion
gaggugccacggcccauccu

SEQ ID NO: 7023 - RNA, 20 nt, Artificial Sequence
  SARM1 targeting guide sequence portion
gagguucagacguggcugca

SEQ ID NO: 7024 - RNA, 20 nt, Artificial Sequence
  SARM1 targeting guide sequence portion
gaguaggaaaccaggcguuu

SEQ ID NO: 7025 - RNA, 20 nt, Artificial Sequence
  SARM1 targeting guide sequence portion
gaucgguuucuccaaguacu

SEQ ID NO: 7026 - RNA, 20 nt, Artificial Sequence
  SARM1 targeting guide sequence portion
gaucugcugcagccacgucu

SEQ ID NO: 7027 - RNA, 20 nt, Artificial Sequence
  SARM1 targeting guide sequence portion
gauggcgccgaugucgcuga

SEQ ID NO: 7028 - RNA, 20 nt, Artificial Sequence
  SARM1 targeting guide sequence portion
gaugggccguggcaccuccu

SEQ ID NO: 7029 - RNA, 20 nt, Artificial Sequence
  SARM1 targeting guide sequence portion
gcaccuccucgcccagcagg

SEQ ID NO: 7030 - RNA, 20 nt, Artificial Sequence
  SARM1 targeting guide sequence portion
gcacggagggcaggaugggc

SEQ ID NO: 7031 - RNA, 20 nt, Artificial Sequence
  SARM1 targeting guide sequence portion
gcacuaagucggcgcuggcc

SEQ ID NO: 7032 - RNA, 20 nt, Artificial Sequence
  SARM1 targeting guide sequence portion
gcagaucgguuucuccaagu

SEQ ID NO: 7033 - RNA, 20 nt, Artificial Sequence
  SARM1 targeting guide sequence portion
gcagcagaucgguuucucca

SEQ ID NO: 7034 - RNA, 20 nt, Artificial Sequence
  SARM1 targeting guide sequence portion
gcagccacgucugaaccucg

SEQ ID NO: 7035 - RNA, 20 nt, Artificial Sequence
  SARM1 targeting guide sequence portion
gcagcgcgcgcuuggccagc

SEQ ID NO: 7036 - RNA, 20 nt, Artificial Sequence
  SARM1 targeting guide sequence portion
gcaggaugggccguggcacc

SEQ ID NO: 7037 - RNA, 20 nt, Artificial Sequence
  SARM1 targeting guide sequence portion
gcaggcgcagcgcgcgcuug

SEQ ID NO: 7038 - RNA, 20 nt, Artificial Sequence
  SARM1 targeting guide sequence portion
gcaguacuuggagaaaccga

SEQ ID NO: 7039 - RNA, 20 nt, Artificial Sequence
  SARM1 targeting guide sequence portion
gccaagcgcgcgcugcgccu

SEQ ID NO: 7040 - RNA, 20 nt, Artificial Sequence
  SARM1 targeting guide sequence portion
gccacggcccauccugcccu

SEQ ID NO: 7041 - RNA, 20 nt, Artificial Sequence
  SARM1 targeting guide sequence portion
gccacgucugaaccucggcc

SEQ ID NO: 7042 - RNA, 20 nt, Artificial Sequence
  SARM1 targeting guide sequence portion
gccagcgccgacuuagugcc

SEQ ID NO: 7043 - RNA, 20 nt, Artificial Sequence
  SARM1 targeting guide sequence portion
gccauccagagccugaaacg

SEQ ID NO: 7044 - RNA, 20 nt, Artificial Sequence
  SARM1 targeting guide sequence portion
gccauugguagaguaggaaa

SEQ ID NO: 7045 - RNA, 20 nt, Artificial Sequence
  SARM1 targeting guide sequence portion
gcccagcaggcgcagcgcgc

SEQ ID NO: 7046 - RNA, 20 nt, Artificial Sequence
  SARM1 targeting guide sequence portion
gcccagcuggaaggaggccg

SEQ ID NO: 7047 - RNA, 20 nt, Artificial Sequence
  SARM1 targeting guide sequence portion
gcccauccugcccuccgugc

SEQ ID NO: 7048 - RNA, 20 nt, Artificial Sequence
  SARM1 targeting guide sequence portion
gcccuccgugcccagcugga

SEQ ID NO: 7049 - RNA, 20 nt, Artificial Sequence
  SARM1 targeting guide sequence portion
gccgacuuagugccauuggu

SEQ ID NO: 7050 - RNA, 20 nt, Artificial Sequence
  SARM1 targeting guide sequence portion
gccgagguucagacguggcu

SEQ ID NO: 7051 - RNA, 20 nt, Artificial Sequence
  SARM1 targeting guide sequence portion
gccguggcaccuccucgccc

SEQ ID NO: 7052 - RNA, 20 nt, Artificial Sequence
  SARM1 targeting guide sequence portion
gccuccuuccagcugggcac

SEQ ID NO: 7053 - RNA, 20 nt, Artificial Sequence
  SARM1 targeting guide sequence portion
gccugaaacgccugguuucc

SEQ ID NO: 7054 - RNA, 20 nt, Artificial Sequence
  SARM1 targeting guide sequence portion
gccugcugggcgaggaggug

SEQ ID NO: 7055 - RNA, 20 nt, Artificial Sequence
  SARM1 targeting guide sequence portion
gccugguuuccuacucuacc

SEQ ID NO: 7056 - RNA, 20 nt, Artificial Sequence
  SARM1 targeting guide sequence portion
gcgacaucggcgccauccag

SEQ ID NO: 7057 - RNA, 20 nt, Artificial Sequence
  SARM1 targeting guide sequence portion
gcgaggaggugccacggccc

SEQ ID NO: 7058 - RNA, 20 nt, Artificial Sequence
  SARM1 targeting guide sequence portion
gcgcagcgcgcgcuuggcca

SEQ ID NO: 7059 - RNA, 20 nt, Artificial Sequence
  SARM1 targeting guide sequence portion
gcgccauccagagccugaaa

SEQ ID NO: 7060 - RNA, 20 nt, Artificial Sequence
  SARM1 targeting guide sequence portion
gcgccgacuuagugccauug

SEQ ID NO: 7061 - RNA, 20 nt, Artificial Sequence
  SARM1 targeting guide sequence portion
gcgccgaugucgcugaacac

SEQ ID NO: 7062 - RNA, 20 nt, Artificial Sequence
  SARM1 targeting guide sequence portion
gcgccugcugggcgaggagg

SEQ ID NO: 7063 - RNA, 20 nt, Artificial Sequence
  SARM1 targeting guide sequence portion
gcgcgcgcugcgccugcugg

SEQ ID NO: 7064 - RNA, 20 nt, Artificial Sequence
  SARM1 targeting guide sequence portion
gcgcgcgcuuggccagcgcc

SEQ ID NO: 7065 - RNA, 20 nt, Artificial Sequence
  SARM1 targeting guide sequence portion
gcgcgcugcgccugcugggc

SEQ ID NO: 7066 - RNA, 20 nt, Artificial Sequence
  SARM1 targeting guide sequence portion
gcgcgcuuggccagcgccga

SEQ ID NO: 7067 - RNA, 20 nt, Artificial Sequence
  SARM1 targeting guide sequence portion
gcgcugcgccugcugggcga

SEQ ID NO: 7068 - RNA, 20 nt, Artificial Sequence
  SARM1 targeting guide sequence portion
gcgcuggccaagcgcgcgcu

SEQ ID NO: 7069 - RNA, 20 nt, Artificial Sequence
  SARM1 targeting guide sequence portion
gcgcuuggccagcgccgacu

SEQ ID NO: 7070 - RNA, 20 nt, Artificial Sequence
  SARM1 targeting guide sequence portion
gcguuucaggcucuggaugg

SEQ ID NO: 7071 - RNA, 20 nt, Artificial Sequence
  SARM1 targeting guide sequence portion
gcucucgcaguacuuggaga

SEQ ID NO: 7072 - RNA, 20 nt, Artificial Sequence
  SARM1 targeting guide sequence portion
gcucuggauggcgccgaugu

SEQ ID NO: 7073 - RNA, 20 nt, Artificial Sequence
  SARM1 targeting guide sequence portion
gcugcagcagaucgguuucu

SEQ ID NO: 7074 - RNA, 20 nt, Artificial Sequence
  SARM1 targeting guide sequence portion
gcugcagccacgucugaacc

SEQ ID NO: 7075 - RNA, 20 nt, Artificial Sequence
  SARM1 targeting guide sequence portion
gcugcgccugcugggcgagg

SEQ ID NO: 7076 - RNA, 20 nt, Artificial Sequence
  SARM1 targeting guide sequence portion
gcuggaaggaggccgagguu

SEQ ID NO: 7077 - RNA, 20 nt, Artificial Sequence
  SARM1 targeting guide sequence portion
gcuggccaagcgcgcgcugc

SEQ ID NO: 7078 - RNA, 20 nt, Artificial Sequence
  SARM1 targeting guide sequence portion
gcugggcacggagggcagga

SEQ ID NO: 7079 - RNA, 20 nt, Artificial Sequence
  SARM1 targeting guide sequence portion
gcugggcgaggaggugccac

SEQ ID NO: 7080 - RNA, 20 nt, Artificial Sequence
  SARM1 targeting guide sequence portion
gcuuggccagcgccgacuua

SEQ ID NO: 7081 - RNA, 20 nt, Artificial Sequence
  SARM1 targeting guide sequence portion
ggaaaccaggcguuucaggc

SEQ ID NO: 7082 - RNA, 20 nt, Artificial Sequence
  SARM1 targeting guide sequence portion
ggaagcucucgcaguacuug

SEQ ID NO: 7083 - RNA, 20 nt, Artificial Sequence
  SARM1 targeting guide sequence portion
ggaaggaggccgagguucag

SEQ ID NO: 7084 - RNA, 20 nt, Artificial Sequence
  SARM1 targeting guide sequence portion
ggagaaaccgaucugcugca

SEQ ID NO: 7085 - RNA, 20 nt, Artificial Sequence
  SARM1 targeting guide sequence portion
ggaggccgagguucagacgu

SEQ ID NO: 7086 - RNA, 20 nt, Artificial Sequence
  SARM1 targeting guide sequence portion
ggagggcaggaugggccgug

SEQ ID NO: 7087 - RNA, 20 nt, Artificial Sequence
  SARM1 targeting guide sequence portion
ggaggugccacggcccaucc

SEQ ID NO: 7088 - RNA, 20 nt, Artificial Sequence
  SARM1 targeting guide sequence portion
ggauggcgccgaugucgcug

SEQ ID NO: 7089 - RNA, 20 nt, Artificial Sequence
  SARM1 targeting guide sequence portion
ggaugggccguggcaccucc

SEQ ID NO: 7090 - RNA, 20 nt, Artificial Sequence
  SARM1 targeting guide sequence portion
ggcaccuccucgcccagcag

SEQ ID NO: 7091 - RNA, 20 nt, Artificial Sequence
  SARM1 targeting guide sequence portion
ggcacggagggcaggauggg

SEQ ID NO: 7092 - RNA, 20 nt, Artificial Sequence
  SARM1 targeting guide sequence portion
ggcacuaagucggcgcuggc

SEQ ID NO: 7093 - RNA, 20 nt, Artificial Sequence
  SARM1 targeting guide sequence portion
ggcaggaugggccguggcac

SEQ ID NO: 7094 - RNA, 20 nt, Artificial Sequence
  SARM1 targeting guide sequence portion
ggccaagcgcgcgcugcgcc

SEQ ID NO: 7095 - RNA, 20 nt, Artificial Sequence
  SARM1 targeting guide sequence portion
ggccagcgccgacuuagugc

SEQ ID NO: 7096 - RNA, 20 nt, Artificial Sequence
  SARM1 targeting guide sequence portion
ggcccauccugcccuccgug

SEQ ID NO: 7097 - RNA, 20 nt, Artificial Sequence
  SARM1 targeting guide sequence portion
ggccgagguucagacguggc

SEQ ID NO: 7098 - RNA, 20 nt, Artificial Sequence
  SARM1 targeting guide sequence portion
ggccguggcaccuccucgcc

SEQ ID NO: 7099 - RNA, 20 nt, Artificial Sequence
  SARM1 targeting guide sequence portion
ggccuccuuccagcugggca

SEQ ID NO: 7100 - RNA, 20 nt, Artificial Sequence
  SARM1 targeting guide sequence portion
ggcgaggaggugccacggcc

SEQ ID NO: 7101 - RNA, 20 nt, Artificial Sequence
  SARM1 targeting guide sequence portion
ggcgcagcgcgcgcuuggcc

SEQ ID NO: 7102 - RNA, 20 nt, Artificial Sequence
  SARM1 targeting guide sequence portion
ggcgccauccagagccugaa

SEQ ID NO: 7103 - RNA, 20 nt, Artificial Sequence
  SARM1 targeting guide sequence portion
ggcgccgaugucgcugaaca

SEQ ID NO: 7104 - RNA, 20 nt, Artificial Sequence
  SARM1 targeting guide sequence portion
ggcgcuggccaagcgcgcgc

SEQ ID NO: 7105 - RNA, 20 nt, Artificial Sequence
  SARM1 targeting guide sequence portion
ggcguuucaggcucuggaug

SEQ ID NO: 7106 - RNA, 20 nt, Artificial Sequence
  SARM1 targeting guide sequence portion
ggcucuggauggcgccgaug

SEQ ID NO: 7107 - RNA, 20 nt, Artificial Sequence
  SARM1 targeting guide sequence portion
ggcugcagcagaucgguuuc

SEQ ID NO: 7108 - RNA, 20 nt, Artificial Sequence
  SARM1 targeting guide sequence portion
gggcacggagggcaggaugg

SEQ ID NO: 7109 - RNA, 20 nt, Artificial Sequence
  SARM1 targeting guide sequence portion
gggcaggaugggccguggca

SEQ ID NO: 7110 - RNA, 20 nt, Artificial Sequence
  SARM1 targeting guide sequence portion
gggccguggcaccuccucgc

SEQ ID NO: 7111 - RNA, 20 nt, Artificial Sequence
  SARM1 targeting guide sequence portion
gggcgaggaggugccacggc

SEQ ID NO: 7112 - RNA, 20 nt, Artificial Sequence
  SARM1 targeting guide sequence portion
gguagaguaggaaaccaggc

SEQ ID NO: 7113 - RNA, 20 nt, Artificial Sequence
  SARM1 targeting guide sequence portion
ggugccacggcccauccugc

SEQ ID NO: 7114 - RNA, 20 nt, Artificial Sequence
  SARM1 targeting guide sequence portion
gguguucagcgacaucggcg

SEQ ID NO: 7115 - RNA, 20 nt, Artificial Sequence
  SARM1 targeting guide sequence portion
gguucagacguggcugcagc

SEQ ID NO: 7116 - RNA, 20 nt, Artificial Sequence
  SARM1 targeting guide sequence portion
gguuuccuacucuaccaaug

SEQ ID NO: 7117 - RNA, 20 nt, Artificial Sequence
  SARM1 targeting guide sequence portion
gguuucuccaaguacugcga

SEQ ID NO: 7118 - RNA, 20 nt, Artificial Sequence
  SARM1 targeting guide sequence portion
guacugcgagagcuuccggg

SEQ ID NO: 7119 - RNA, 20 nt, Artificial Sequence
  SARM1 targeting guide sequence portion
guacuuggagaaaccgaucu

SEQ ID NO: 7120 - RNA, 20 nt, Artificial Sequence
  SARM1 targeting guide sequence portion
guagaguaggaaaccaggcg

SEQ ID NO: 7121 - RNA, 20 nt, Artificial Sequence
  SARM1 targeting guide sequence portion
guaggaaaccaggcguuuca

SEQ ID NO: 7122 - RNA, 20 nt, Artificial Sequence
  SARM1 targeting guide sequence portion
gucggcgcuggccaagcgcg

SEQ ID NO: 7123 - RNA, 20 nt, Artificial Sequence
  SARM1 targeting guide sequence portion
gucugaaccucggccuccuu

SEQ ID NO: 7124 - RNA, 20 nt, Artificial Sequence
  SARM1 targeting guide sequence portion
gugccacggcccauccugcc

SEQ ID NO: 7125 - RNA, 20 nt, Artificial Sequence
  SARM1 targeting guide sequence portion
gugccauugguagaguagga

SEQ ID NO: 7126 - RNA, 20 nt, Artificial Sequence
  SARM1 targeting guide sequence portion
gugcccagcuggaaggaggc

SEQ ID NO: 7127 - RNA, 20 nt, Artificial Sequence
  SARM1 targeting guide sequence portion
guggcaccuccucgcccagc

SEQ ID NO: 7128 - RNA, 20 nt, Artificial Sequence
  SARM1 targeting guide sequence portion
guggcugcagcagaucgguu

SEQ ID NO: 7129 - RNA, 20 nt, Artificial Sequence
  SARM1 targeting guide sequence portion
guguucagcgacaucggcgc

SEQ ID NO: 7130 - RNA, 20 nt, Artificial Sequence
  SARM1 targeting guide sequence portion
guucagacguggcugcagca

SEQ ID NO: 7131 - RNA, 20 nt, Artificial Sequence
  SARM1 targeting guide sequence portion
guucagcgacaucggcgcca

SEQ ID NO: 7132 - RNA, 20 nt, Artificial Sequence
  SARM1 targeting guide sequence portion
guuucaggcucuggauggcg

SEQ ID NO: 7133 - RNA, 20 nt, Artificial Sequence
  SARM1 targeting guide sequence portion
guuuccuacucuaccaaugg

SEQ ID NO: 7134 - RNA, 20 nt, Artificial Sequence
  SARM1 targeting guide sequence portion
guuucuccaaguacugcgag

SEQ ID NO: 7135 - RNA, 20 nt, Artificial Sequence
  SARM1 targeting guide sequence portion
uaagucggcgcuggccaagc

SEQ ID NO: 7136 - RNA, 20 nt, Artificial Sequence
  SARM1 targeting guide sequence portion
uaccaauggcacuaagucgg

SEQ ID NO: 7137 - RNA, 20 nt, Artificial Sequence
  SARM1 targeting guide sequence portion
uacccggaagcucucgcagu

SEQ ID NO: 7138 - RNA, 20 nt, Artificial Sequence
  SARM1 targeting guide sequence portion
uacucuaccaauggcacuaa

SEQ ID NO: 7139 - RNA, 20 nt, Artificial Sequence
  SARM1 targeting guide sequence portion
uacuuggagaaaccgaucug

SEQ ID NO: 7140 - RNA, 20 nt, Artificial Sequence
  SARM1 targeting guide sequence portion
uagaguaggaaaccaggcgu

SEQ ID NO: 7141 - RNA, 20 nt, Artificial Sequence
  SARM1 targeting guide sequence portion
uaggaaaccaggcguuucag

SEQ ID NO: 7142 - RNA, 20 nt, Artificial Sequence
  SARM1 targeting guide sequence portion
uagguguucagcgacaucgg

SEQ ID NO: 7143 - RNA, 20 nt, Artificial Sequence
  SARM1 targeting guide sequence portion
uagugccauugguagaguag

SEQ ID NO: 7144 - RNA, 20 nt, Artificial Sequence
  SARM1 targeting guide sequence portion
ucagacguggcugcagcaga

SEQ ID NO: 7145 - RNA, 20 nt, Artificial Sequence
  SARM1 targeting guide sequence portion
ucagcgacaucggcgccauc

SEQ ID NO: 7146 - RNA, 20 nt, Artificial Sequence
  SARM1 targeting guide sequence portion
ucaggcucuggauggcgccg

SEQ ID NO: 7147 - RNA, 20 nt, Artificial Sequence
  SARM1 targeting guide sequence portion
uccaaguacugcgagagcuu

SEQ ID NO: 7148 - RNA, 20 nt, Artificial Sequence
  SARM1 targeting guide sequence portion
uccagagccugaaacgccug

SEQ ID NO: 7149 - RNA, 20 nt, Artificial Sequence
  SARM1 targeting guide sequence portion
uccagcugggcacggagggc

SEQ ID NO: 7150 - RNA, 20 nt, Artificial Sequence
  SARM1 targeting guide sequence portion
ucccuagguguucagcgaca

SEQ ID NO: 7151 - RNA, 20 nt, Artificial Sequence
  SARM1 targeting guide sequence portion
uccgugcccagcuggaagga

SEQ ID NO: 7152 - RNA, 20 nt, Artificial Sequence
  SARM1 targeting guide sequence portion
uccuacucuaccaauggcac

SEQ ID NO: 7153 - RNA, 20 nt, Artificial Sequence
  SARM1 targeting guide sequence portion
uccucgcccagcaggcgcag

SEQ ID NO: 7154 - RNA, 20 nt, Artificial Sequence
  SARM1 targeting guide sequence portion
uccugcccuccgugcccagc

SEQ ID NO: 7155 - RNA, 20 nt, Artificial Sequence
  SARM1 targeting guide sequence portion
uccuuccagcugggcacgga

SEQ ID NO: 7156 - RNA, 20 nt, Artificial Sequence
  SARM1 targeting guide sequence portion
ucgcaguacuuggagaaacc

SEQ ID NO: 7157 - RNA, 20 nt, Artificial Sequence
  SARM1 targeting guide sequence portion
ucgcccagcaggcgcagcgc

SEQ ID NO: 7158 - RNA, 20 nt, Artificial Sequence
  SARM1 targeting guide sequence portion
ucggccuccuuccagcuggg

SEQ ID NO: 7159 - RNA, 20 nt, Artificial Sequence
  SARM1 targeting guide sequence portion
ucggcgccauccagagccug

SEQ ID NO: 7160 - RNA, 20 nt, Artificial Sequence
  SARM1 targeting guide sequence portion
ucggcgcuggccaagcgcgc

SEQ ID NO: 7161 - RNA, 20 nt, Artificial Sequence
  SARM1 targeting guide sequence portion
ucgguuucuccaaguacugc

SEQ ID NO: 7162 - RNA, 20 nt, Artificial Sequence
  SARM1 targeting guide sequence portion
ucuaccaauggcacuaaguc

SEQ ID NO: 7163 - RNA, 20 nt, Artificial Sequence
  SARM1 targeting guide sequence portion
ucuacccggaagcucucgca

SEQ ID NO: 7164 - RNA, 20 nt, Artificial Sequence
  SARM1 targeting guide sequence portion
ucuccaaguacugcgagagc

SEQ ID NO: 7165 - RNA, 20 nt, Artificial Sequence
  SARM1 targeting guide sequence portion
ucucgcaguacuuggagaaa

SEQ ID NO: 7166 - RNA, 20 nt, Artificial Sequence
  SARM1 targeting guide sequence portion
ucugaaccucggccuccuuc

SEQ ID NO: 7167 - RNA, 20 nt, Artificial Sequence
  SARM1 targeting guide sequence portion
ucugcugcagccacgucuga

SEQ ID NO: 7168 - RNA, 20 nt, Artificial Sequence
  SARM1 targeting guide sequence portion
ucuggauggcgccgaugucg

SEQ ID NO: 7169 - RNA, 20 nt, Artificial Sequence
  SARM1 targeting guide sequence portion
ugaaacgccugguuuccuac

SEQ ID NO: 7170 - RNA, 20 nt, Artificial Sequence
  SARM1 targeting guide sequence portion
ugaaccucggccuccuucca

SEQ ID NO: 7171 - RNA, 20 nt, Artificial Sequence
  SARM1 targeting guide sequence portion
ugcagcagaucgguuucucc

SEQ ID NO: 7172 - RNA, 20 nt, Artificial Sequence
  SARM1 targeting guide sequence portion
ugcagccacgucugaaccuc

SEQ ID NO: 7173 - RNA, 20 nt, Artificial Sequence
  SARM1 targeting guide sequence portion
ugccacggcccauccugccc

SEQ ID NO: 7174 - RNA, 20 nt, Artificial Sequence
  SARM1 targeting guide sequence portion
ugccauugguagaguaggaa

SEQ ID NO: 7175 - RNA, 20 nt, Artificial Sequence
  SARM1 targeting guide sequence portion
ugcccagcuggaaggaggcc

SEQ ID NO: 7176 - RNA, 20 nt, Artificial Sequence
  SARM1 targeting guide sequence portion
ugcccuccgugcccagcugg

SEQ ID NO: 7177 - RNA, 20 nt, Artificial Sequence
  SARM1 targeting guide sequence portion
ugcgccugcugggcgaggag

SEQ ID NO: 7178 - RNA, 20 nt, Artificial Sequence
  SARM1 targeting guide sequence portion
ugcugcagccacgucugaac

SEQ ID NO: 7179 - RNA, 20 nt, Artificial Sequence
  SARM1 targeting guide sequence portion
ugcugggcgaggaggugcca

SEQ ID NO: 7180 - RNA, 20 nt, Artificial Sequence
  SARM1 targeting guide sequence portion
uggaaggaggccgagguuca

SEQ ID NO: 7181 - RNA, 20 nt, Artificial Sequence
  SARM1 targeting guide sequence portion
uggagaaaccgaucugcugc

SEQ ID NO: 7182 - RNA, 20 nt, Artificial Sequence
  SARM1 targeting guide sequence portion
uggauggcgccgaugucgcu

SEQ ID NO: 7183 - RNA, 20 nt, Artificial Sequence
  SARM1 targeting guide sequence portion
uggcaccuccucgcccagca

SEQ ID NO: 7184 - RNA, 20 nt, Artificial Sequence
  SARM1 targeting guide sequence portion
uggcacuaagucggcgcugg

SEQ ID NO: 7185 - RNA, 20 nt, Artificial Sequence
  SARM1 targeting guide sequence portion
uggccaagcgcgcgcugcgc

SEQ ID NO: 7186 - RNA, 20 nt, Artificial Sequence
  SARM1 targeting guide sequence portion
uggccagcgccgacuuagug

SEQ ID NO: 7187 - RNA, 20 nt, Artificial Sequence
  SARM1 targeting guide sequence portion
uggcgccgaugucgcugaac

SEQ ID NO: 7188 - RNA, 20 nt, Artificial Sequence
  SARM1 targeting guide sequence portion
uggcugcagcagaucgguuu

SEQ ID NO: 7189 - RNA, 20 nt, Artificial Sequence
  SARM1 targeting guide sequence portion
ugggcacggagggcaggaug

SEQ ID NO: 7190 - RNA, 20 nt, Artificial Sequence
  SARM1 targeting guide sequence portion
ugggccguggcaccuccucg

SEQ ID NO: 7191 - RNA, 20 nt, Artificial Sequence
  SARM1 targeting guide sequence portion
ugggcgaggaggugccacgg

SEQ ID NO: 7192 - RNA, 20 nt, Artificial Sequence
  SARM1 targeting guide sequence portion
ugguagaguaggaaaccagg

SEQ ID NO: 7193 - RNA, 20 nt, Artificial Sequence
  SARM1 targeting guide sequence portion
ugguuuccuacucuaccaau

SEQ ID NO: 7194 - RNA, 20 nt, Artificial Sequence
  SARM1 targeting guide sequence portion
uguucagcgacaucggcgcc

SEQ ID NO: 7195 - RNA, 20 nt, Artificial Sequence
  SARM1 targeting guide sequence portion
uuagugccauugguagagua

SEQ ID NO: 7196 - RNA, 20 nt, Artificial Sequence
  SARM1 targeting guide sequence portion
uucagacguggcugcagcag

SEQ ID NO: 7197 - RNA, 20 nt, Artificial Sequence
  SARM1 targeting guide sequence portion
uucagcgacaucggcgccau

SEQ ID NO: 7198 - RNA, 20 nt, Artificial Sequence
  SARM1 targeting guide sequence portion
uucaggcucuggauggcgcc

SEQ ID NO: 7199 - RNA, 20 nt, Artificial Sequence
  SARM1 targeting guide sequence portion
uuccagcugggcacggaggg

SEQ ID NO: 7200 - RNA, 20 nt, Artificial Sequence
  SARM1 targeting guide sequence portion
uuccuacucuaccaauggca

SEQ ID NO: 7201 - RNA, 20 nt, Artificial Sequence
  SARM1 targeting guide sequence portion
uucuccaaguacugcgagag

SEQ ID NO: 7202 - RNA, 20 nt, Artificial Sequence
  SARM1 targeting guide sequence portion
uuggagaaaccgaucugcug

SEQ ID NO: 7203 - RNA, 20 nt, Artificial Sequence
  SARM1 targeting guide sequence portion
uuggccagcgccgacuuagu

SEQ ID NO: 7204 - RNA, 20 nt, Artificial Sequence
  SARM1 targeting guide sequence portion
uugguagaguaggaaaccag

SEQ ID NO: 7205 - RNA, 20 nt, Artificial Sequence
  SARM1 targeting guide sequence portion
uuucaggcucuggauggcgc

SEQ ID NO: 7206 - RNA, 20 nt, Artificial Sequence
  SARM1 targeting guide sequence portion
uuuccuacucuaccaauggc

SEQ ID NO: 7207 - RNA, 20 nt, Artificial Sequence
  SARM1 targeting guide sequence portion
uuucuccaaguacugcgaga

SEQ ID NO: 7208 - RNA, 21 nt, Artificial Sequence
  SARM1 targeting guide sequence portion
aaaccaggcguuucaggcucu

SEQ ID NO: 7209 - RNA, 21 nt, Artificial Sequence
  SARM1 targeting guide sequence portion
aaaccgaucugcugcagccac

SEQ ID NO: 7210 - RNA, 21 nt, Artificial Sequence
  SARM1 targeting guide sequence portion
aaacgccugguuuccuacucu

SEQ ID NO: 7211 - RNA, 21 nt, Artificial Sequence
  SARM1 targeting guide sequence portion
aaccaggcguuucaggcucug

SEQ ID NO: 7212 - RNA, 21 nt, Artificial Sequence
  SARM1 targeting guide sequence portion
aaccgaucugcugcagccacg

SEQ ID NO: 7213 - RNA, 21 nt, Artificial Sequence
  SARM1 targeting guide sequence portion
aaccucggccuccuuccagcu

SEQ ID NO: 7214 - RNA, 21 nt, Artificial Sequence
  SARM1 targeting guide sequence portion
aacgccugguuuccuacucua

SEQ ID NO: 7215 - RNA, 21 nt, Artificial Sequence
  SARM1 targeting guide sequence portion
aagcgcgcgcugcgccugcug

SEQ ID NO: 7216 - RNA, 21 nt, Artificial Sequence
  SARM1 targeting guide sequence portion
aagcucucgcaguacuuggag

SEQ ID NO: 7217 - RNA, 21 nt, Artificial Sequence
  SARM1 targeting guide sequence portion
aaggaggccgagguucagacg

SEQ ID NO: 7218 - RNA, 21 nt, Artificial Sequence
  SARM1 targeting guide sequence portion
aaguacugcgagagcuuccgg

SEQ ID NO: 7219 - RNA, 21 nt, Artificial Sequence
  SARM1 targeting guide sequence portion
aagucggcgcuggccaagcgc

SEQ ID NO: 7220 - RNA, 21 nt, Artificial Sequence
  SARM1 targeting guide sequence portion
aauggcacuaagucggcgcug

SEQ ID NO: 7221 - RNA, 21 nt, Artificial Sequence
  SARM1 targeting guide sequence portion
acaucggcgccauccagagcc

SEQ ID NO: 7222 - RNA, 21 nt, Artificial Sequence
  SARM1 targeting guide sequence portion
accaauggcacuaagucggcg

SEQ ID NO: 7223 - RNA, 21 nt, Artificial Sequence
  SARM1 targeting guide sequence portion
accaggcguuucaggcucugg

SEQ ID NO: 7224 - RNA, 21 nt, Artificial Sequence
  SARM1 targeting guide sequence portion
acccggaagcucucgcaguac

SEQ ID NO: 7225 - RNA, 21 nt, Artificial Sequence
  SARM1 targeting guide sequence portion
accgaucugcugcagccacgu

SEQ ID NO: 7226 - RNA, 21 nt, Artificial Sequence
  SARM1 targeting guide sequence portion
accuccucgcccagcaggcgc

SEQ ID NO: 7227 - RNA, 21 nt, Artificial Sequence
  SARM1 targeting guide sequence portion
accucggccuccuuccagcug

SEQ ID NO: 7228 - RNA, 21 nt, Artificial Sequence
  SARM1 targeting guide sequence portion
acgccugguuuccuacucuac

SEQ ID NO: 7229 - RNA, 21 nt, Artificial Sequence
  SARM1 targeting guide sequence portion
acggagggcaggaugggccgu

SEQ ID NO: 7230 - RNA, 21 nt, Artificial Sequence
  SARM1 targeting guide sequence portion
acggcccauccugcccuccgu

SEQ ID NO: 7231 - RNA, 21 nt, Artificial Sequence
  SARM1 targeting guide sequence portion
acgucugaaccucggccuccu

SEQ ID NO: 7232 - RNA, 21 nt, Artificial Sequence
  SARM1 targeting guide sequence portion
acguggcugcagcagaucggu

SEQ ID NO: 7233 - RNA, 21 nt, Artificial Sequence
  SARM1 targeting guide sequence portion
acuaagucggcgcuggccaag

SEQ ID NO: 7234 - RNA, 21 nt, Artificial Sequence
  SARM1 targeting guide sequence portion
acucuaccaauggcacuaagu

SEQ ID NO: 7235 - RNA, 21 nt, Artificial Sequence
  SARM1 targeting guide sequence portion
acucuacccggaagcucucgc

SEQ ID NO: 7236 - RNA, 21 nt, Artificial Sequence
  SARM1 targeting guide sequence portion
acuuagugccauugguagagu

SEQ ID NO: 7237 - RNA, 21 nt, Artificial Sequence
  SARM1 targeting guide sequence portion
acuuggagaaaccgaucugcu

SEQ ID NO: 7238 - RNA, 21 nt, Artificial Sequence
  SARM1 targeting guide sequence portion
agaaaccgaucugcugcagcc

SEQ ID NO: 7239 - RNA, 21 nt, Artificial Sequence
  SARM1 targeting guide sequence portion
agacguggcugcagcagaucg

SEQ ID NO: 7240 - RNA, 21 nt, Artificial Sequence
  SARM1 targeting guide sequence portion
agagccugaaacgccugguuu

SEQ ID NO: 7241 - RNA, 21 nt, Artificial Sequence
  SARM1 targeting guide sequence portion
agaguaggaaaccaggcguuu

SEQ ID NO: 7242 - RNA, 21 nt, Artificial Sequence
  SARM1 targeting guide sequence portion
agaucgguuucuccaaguacu

SEQ ID NO: 7243 - RNA, 21 nt, Artificial Sequence
  SARM1 targeting guide sequence portion
agcagaucgguuucuccaagu

SEQ ID NO: 7244 - RNA, 21 nt, Artificial Sequence
  SARM1 targeting guide sequence portion
agcaggcgcagcgcgcgcuug

SEQ ID NO: 7245 - RNA, 21 nt, Artificial Sequence
  SARM1 targeting guide sequence portion
agccacgucugaaccucggcc

SEQ ID NO: 7246 - RNA, 21 nt, Artificial Sequence
  SARM1 targeting guide sequence portion
agccugaaacgccugguuucc

SEQ ID NO: 7247 - RNA, 21 nt, Artificial Sequence
  SARM1 targeting guide sequence portion
agcgacaucggcgccauccag

SEQ ID NO: 7248 - RNA, 21 nt, Artificial Sequence
  SARM1 targeting guide sequence portion
agcgccgacuuagugccauug

SEQ ID NO: 7249 - RNA, 21 nt, Artificial Sequence
  SARM1 targeting guide sequence portion
agcgcgcgcugcgccugcugg

SEQ ID NO: 7250 - RNA, 21 nt, Artificial Sequence
  SARM1 targeting guide sequence portion
agcgcgcgcuuggccagcgcc

SEQ ID NO: 7251 - RNA, 21 nt, Artificial Sequence
  SARM1 targeting guide sequence portion
agcucucgcaguacuuggaga

SEQ ID NO: 7252 - RNA, 21 nt, Artificial Sequence
  SARM1 targeting guide sequence portion
agcuggaaggaggccgagguu

SEQ ID NO: 7253 - RNA, 21 nt, Artificial Sequence
  SARM1 targeting guide sequence portion
agcugggcacggagggcagga

SEQ ID NO: 7254 - RNA, 21 nt, Artificial Sequence
  SARM1 targeting guide sequence portion
aggaaaccaggcguuucaggc

SEQ ID NO: 7255 - RNA, 21 nt, Artificial Sequence
  SARM1 targeting guide sequence portion
aggaggccgagguucagacgu

SEQ ID NO: 7256 - RNA, 21 nt, Artificial Sequence
  SARM1 targeting guide sequence portion
aggaggugccacggcccaucc

SEQ ID NO: 7257 - RNA, 21 nt, Artificial Sequence
  SARM1 targeting guide sequence portion
aggaugggccguggcaccucc

SEQ ID NO: 7258 - RNA, 21 nt, Artificial Sequence
  SARM1 targeting guide sequence portion
aggccgagguucagacguggc

SEQ ID NO: 7259 - RNA, 21 nt, Artificial Sequence
  SARM1 targeting guide sequence portion
aggcgcagcgcgcgcuuggcc

SEQ ID NO: 7260 - RNA, 21 nt, Artificial Sequence
  SARM1 targeting guide sequence portion
aggcguuucaggcucuggaug

SEQ ID NO: 7261 - RNA, 21 nt, Artificial Sequence
  SARM1 targeting guide sequence portion
aggcucuggauggcgccgaug

SEQ ID NO: 7262 - RNA, 21 nt, Artificial Sequence
  SARM1 targeting guide sequence portion
agggcaggaugggccguggca

SEQ ID NO: 7263 - RNA, 21 nt, Artificial Sequence
  SARM1 targeting guide sequence portion
aggugccacggcccauccugc

SEQ ID NO: 7264 - RNA, 21 nt, Artificial Sequence
  SARM1 targeting guide sequence portion
agguguucagcgacaucggcg

SEQ ID NO: 7265 - RNA, 21 nt, Artificial Sequence
  SARM1 targeting guide sequence portion
agguucagacguggcugcagc

SEQ ID NO: 7266 - RNA, 21 nt, Artificial Sequence
  SARM1 targeting guide sequence portion
aguacugcgagagcuuccggg

SEQ ID NO: 7267 - RNA, 21 nt, Artificial Sequence
  SARM1 targeting guide sequence portion
aguacuuggagaaaccgaucu

SEQ ID NO: 7268 - RNA, 21 nt, Artificial Sequence
  SARM1 targeting guide sequence portion
aguaggaaaccaggcguuuca

SEQ ID NO: 7269 - RNA, 21 nt, Artificial Sequence
  SARM1 targeting guide sequence portion
agucggcgcuggccaagcgcg

SEQ ID NO: 7270 - RNA, 21 nt, Artificial Sequence
  SARM1 targeting guide sequence portion
agugccauugguagaguagga

SEQ ID NO: 7271 - RNA, 21 nt, Artificial Sequence
  SARM1 targeting guide sequence portion
auccagagccugaaacgccug

SEQ ID NO: 7272 - RNA, 21 nt, Artificial Sequence
  SARM1 targeting guide sequence portion
auccugcccuccgugcccagc

SEQ ID NO: 7273 - RNA, 21 nt, Artificial Sequence
  SARM1 targeting guide sequence portion
aucggcgccauccagagccug

SEQ ID NO: 7274 - RNA, 21 nt, Artificial Sequence
  SARM1 targeting guide sequence portion
aucgguuucuccaaguacugc

SEQ ID NO: 7275 - RNA, 21 nt, Artificial Sequence
  SARM1 targeting guide sequence portion
aucugcugcagccacgucuga

SEQ ID NO: 7276 - RNA, 21 nt, Artificial Sequence
  SARM1 targeting guide sequence portion
auggcacuaagucggcgcugg

SEQ ID NO: 7277 - RNA, 21 nt, Artificial Sequence
  SARM1 targeting guide sequence portion
auggcgccgaugucgcugaac

SEQ ID NO: 7278 - RNA, 21 nt, Artificial Sequence
  SARM1 targeting guide sequence portion
augggccguggcaccuccucg

SEQ ID NO: 7279 - RNA, 21 nt, Artificial Sequence
  SARM1 targeting guide sequence portion
auugguagaguaggaaaccag

SEQ ID NO: 7280 - RNA, 21 nt, Artificial Sequence
  SARM1 targeting guide sequence portion
caagcgcgcgcugcgccugcu

SEQ ID NO: 7281 - RNA, 21 nt, Artificial Sequence
  SARM1 targeting guide sequence portion
caaguacugcgagagcuuccg

SEQ ID NO: 7282 - RNA, 21 nt, Artificial Sequence
  SARM1 targeting guide sequence portion
caauggcacuaagucggcgcu

SEQ ID NO: 7283 - RNA, 21 nt, Artificial Sequence
  SARM1 targeting guide sequence portion
caccuccucgcccagcaggcg

SEQ ID NO: 7284 - RNA, 21 nt, Artificial Sequence
  SARM1 targeting guide sequence portion
cacggagggcaggaugggccg

SEQ ID NO: 7285 - RNA, 21 nt, Artificial Sequence
  SARM1 targeting guide sequence portion
cacggcccauccugcccuccg

SEQ ID NO: 7286 - RNA, 21 nt, Artificial Sequence
  SARM1 targeting guide sequence portion
cacgucugaaccucggccucc

SEQ ID NO: 7287 - RNA, 21 nt, Artificial Sequence
  SARM1 targeting guide sequence portion
cacuaagucggcgcuggccaa

SEQ ID NO: 7288 - RNA, 21 nt, Artificial Sequence
  SARM1 targeting guide sequence portion
cagacguggcugcagcagauc

SEQ ID NO: 7289 - RNA, 21 nt, Artificial Sequence
  SARM1 targeting guide sequence portion
cagagccugaaacgccugguu

SEQ ID NO: 7290 - RNA, 21 nt, Artificial Sequence
  SARM1 targeting guide sequence portion
cagaucgguuucuccaaguac

SEQ ID NO: 7291 - RNA, 21 nt, Artificial Sequence
  SARM1 targeting guide sequence portion
cagcagaucgguuucuccaag

SEQ ID NO: 7292 - RNA, 21 nt, Artificial Sequence
  SARM1 targeting guide sequence portion
cagcaggcgcagcgcgcgcuu

SEQ ID NO: 7293 - RNA, 21 nt, Artificial Sequence
  SARM1 targeting guide sequence portion
cagccacgucugaaccucggc

SEQ ID NO: 7294 - RNA, 21 nt, Artificial Sequence
  SARM1 targeting guide sequence portion
cagcgacaucggcgccaucca

SEQ ID NO: 7295 - RNA, 21 nt, Artificial Sequence
  SARM1 targeting guide sequence portion
cagcgccgacuuagugccauu

SEQ ID NO: 7296 - RNA, 21 nt, Artificial Sequence
  SARM1 targeting guide sequence portion
cagcgcgcgcuuggccagcgc

SEQ ID NO: 7297 - RNA, 21 nt, Artificial Sequence
  SARM1 targeting guide sequence portion
cagcuggaaggaggccgaggu

SEQ ID NO: 7298 - RNA, 21 nt, Artificial Sequence
  SARM1 targeting guide sequence portion
cagcugggcacggagggcagg

SEQ ID NO: 7299 - RNA, 21 nt, Artificial Sequence
  SARM1 targeting guide sequence portion
caggaugggccguggcaccuc

SEQ ID NO: 7300 - RNA, 21 nt, Artificial Sequence
  SARM1 targeting guide sequence portion
caggcgcagcgcgcgcuuggc

SEQ ID NO: 7301 - RNA, 21 nt, Artificial Sequence
  SARM1 targeting guide sequence portion
caggcguuucaggcucuggau

SEQ ID NO: 7302 - RNA, 21 nt, Artificial Sequence
  SARM1 targeting guide sequence portion
caggcucuggauggcgccgau

SEQ ID NO: 7303 - RNA, 21 nt, Artificial Sequence
  SARM1 targeting guide sequence portion
caguacuuggagaaaccgauc

SEQ ID NO: 7304 - RNA, 21 nt, Artificial Sequence
  SARM1 targeting guide sequence portion
cauccagagccugaaacgccu

SEQ ID NO: 7305 - RNA, 21 nt, Artificial Sequence
  SARM1 targeting guide sequence portion
cauccugcccuccgugcccag

SEQ ID NO: 7306 - RNA, 21 nt, Artificial Sequence
  SARM1 targeting guide sequence portion
caucggcgccauccagagccu

SEQ ID NO: 7307 - RNA, 21 nt, Artificial Sequence
  SARM1 targeting guide sequence portion
cauugguagaguaggaaacca

SEQ ID NO: 7308 - RNA, 21 nt, Artificial Sequence
  SARM1 targeting guide sequence portion
ccaagcgcgcgcugcgccugc

SEQ ID NO: 7309 - RNA, 21 nt, Artificial Sequence
  SARM1 targeting guide sequence portion
ccaaguacugcgagagcuucc

SEQ ID NO: 7310 - RNA, 21 nt, Artificial Sequence
  SARM1 targeting guide sequence portion
ccaauggcacuaagucggcgc

SEQ ID NO: 7311 - RNA, 21 nt, Artificial Sequence
  SARM1 targeting guide sequence portion
ccacggcccauccugcccucc

SEQ ID NO: 7312 - RNA, 21 nt, Artificial Sequence
  SARM1 targeting guide sequence portion
ccacgucugaaccucggccuc

SEQ ID NO: 7313 - RNA, 21 nt, Artificial Sequence
  SARM1 targeting guide sequence portion
ccagagccugaaacgccuggu

SEQ ID NO: 7314 - RNA, 21 nt, Artificial Sequence
  SARM1 targeting guide sequence portion
ccagcaggcgcagcgcgcgcu

SEQ ID NO: 7315 - RNA, 21 nt, Artificial Sequence
  SARM1 targeting guide sequence portion
ccagcgccgacuuagugccau

SEQ ID NO: 7316 - RNA, 21 nt, Artificial Sequence
  SARM1 targeting guide sequence portion
ccagcuggaaggaggccgagg

SEQ ID NO: 7317 - RNA, 21 nt, Artificial Sequence
  SARM1 targeting guide sequence portion
ccagcugggcacggagggcag

SEQ ID NO: 7318 - RNA, 21 nt, Artificial Sequence
  SARM1 targeting guide sequence portion
ccaggcguuucaggcucugga

SEQ ID NO: 7319 - RNA, 21 nt, Artificial Sequence
  SARM1 targeting guide sequence portion
ccauccagagccugaaacgcc

SEQ ID NO: 7320 - RNA, 21 nt, Artificial Sequence
  SARM1 targeting guide sequence portion
ccauccugcccuccgugccca

SEQ ID NO: 7321 - RNA, 21 nt, Artificial Sequence
  SARM1 targeting guide sequence portion
ccauugguagaguaggaaacc

SEQ ID NO: 7322 - RNA, 21 nt, Artificial Sequence
  SARM1 targeting guide sequence portion
cccagcaggcgcagcgcgcgc

SEQ ID NO: 7323 - RNA, 21 nt, Artificial Sequence
  SARM1 targeting guide sequence portion
cccagcuggaaggaggccgag

SEQ ID NO: 7324 - RNA, 21 nt, Artificial Sequence
  SARM1 targeting guide sequence portion
cccauccugcccuccgugccc

SEQ ID NO: 7325 - RNA, 21 nt, Artificial Sequence
  SARM1 targeting guide sequence portion
cccggaagcucucgcaguacu

SEQ ID NO: 7326 - RNA, 21 nt, Artificial Sequence
  SARM1 targeting guide sequence portion
cccuagguguucagcgacauc

SEQ ID NO: 7327 - RNA, 21 nt, Artificial Sequence
  SARM1 targeting guide sequence portion
cccuccgugcccagcuggaag

SEQ ID NO: 7328 - RNA, 21 nt, Artificial Sequence
  SARM1 targeting guide sequence portion
ccgacuuagugccauugguag

SEQ ID NO: 7329 - RNA, 21 nt, Artificial Sequence
  SARM1 targeting guide sequence portion
ccgagguucagacguggcugc

SEQ ID NO: 7330 - RNA, 21 nt, Artificial Sequence
  SARM1 targeting guide sequence portion
ccgaucugcugcagccacguc

SEQ ID NO: 7331 - RNA, 21 nt, Artificial Sequence
  SARM1 targeting guide sequence portion
ccggaagcucucgcaguacuu

SEQ ID NO: 7332 - RNA, 21 nt, Artificial Sequence
  SARM1 targeting guide sequence portion
ccgugcccagcuggaaggagg

SEQ ID NO: 7333 - RNA, 21 nt, Artificial Sequence
  SARM1 targeting guide sequence portion
ccguggcaccuccucgcccag

SEQ ID NO: 7334 - RNA, 21 nt, Artificial Sequence
  SARM1 targeting guide sequence portion
ccuacucuaccaauggcacua

SEQ ID NO: 7335 - RNA, 21 nt, Artificial Sequence
  SARM1 targeting guide sequence portion
ccuagguguucagcgacaucg

SEQ ID NO: 7336 - RNA, 21 nt, Artificial Sequence
  SARM1 targeting guide sequence portion
ccuccgugcccagcuggaagg

SEQ ID NO: 7337 - RNA, 21 nt, Artificial Sequence
  SARM1 targeting guide sequence portion
ccuccucgcccagcaggcgca

SEQ ID NO: 7338 - RNA, 21 nt, Artificial Sequence
  SARM1 targeting guide sequence portion
ccuccuuccagcugggcacgg

SEQ ID NO: 7339 - RNA, 21 nt, Artificial Sequence
  SARM1 targeting guide sequence portion
ccucgcccagcaggcgcagcg

SEQ ID NO: 7340 - RNA, 21 nt, Artificial Sequence
  SARM1 targeting guide sequence portion
ccucggccuccuuccagcugg

SEQ ID NO: 7341 - RNA, 21 nt, Artificial Sequence
  SARM1 targeting guide sequence portion
ccugaaacgccugguuuccua

SEQ ID NO: 7342 - RNA, 21 nt, Artificial Sequence
  SARM1 targeting guide sequence portion
ccugcccuccgugcccagcug

SEQ ID NO: 7343 - RNA, 21 nt, Artificial Sequence
  SARM1 targeting guide sequence portion
ccugcugggcgaggaggugcc

SEQ ID NO: 7344 - RNA, 21 nt, Artificial Sequence
  SARM1 targeting guide sequence portion
ccugguuuccuacucuaccaa

SEQ ID NO: 7345 - RNA, 21 nt, Artificial Sequence
  SARM1 targeting guide sequence portion
ccuuccagcugggcacggagg

SEQ ID NO: 7346 - RNA, 21 nt, Artificial Sequence
  SARM1 targeting guide sequence portion
cgacaucggcgccauccagag

SEQ ID NO: 7347 - RNA, 21 nt, Artificial Sequence
  SARM1 targeting guide sequence portion
cgacuuagugccauugguaga

SEQ ID NO: 7348 - RNA, 21 nt, Artificial Sequence
  SARM1 targeting guide sequence portion
cgaggaggugccacggcccau

SEQ ID NO: 7349 - RNA, 21 nt, Artificial Sequence
  SARM1 targeting guide sequence portion
cgagguucagacguggcugca

SEQ ID NO: 7350 - RNA, 21 nt, Artificial Sequence
  SARM1 targeting guide sequence portion
cgaucugcugcagccacgucu

SEQ ID NO: 7351 - RNA, 21 nt, Artificial Sequence
  SARM1 targeting guide sequence portion
cgcagcgcgcgcuuggccagc

SEQ ID NO: 7352 - RNA, 21 nt, Artificial Sequence
  SARM1 targeting guide sequence portion
cgcaguacuuggagaaaccga

SEQ ID NO: 7353 - RNA, 21 nt, Artificial Sequence
  SARM1 targeting guide sequence portion
cgccauccagagccugaaacg

SEQ ID NO: 7354 - RNA, 21 nt, Artificial Sequence
  SARM1 targeting guide sequence portion
cgcccagcaggcgcagcgcgc

SEQ ID NO: 7355 - RNA, 21 nt, Artificial Sequence
  SARM1 targeting guide sequence portion
cgccgacuuagugccauuggu

SEQ ID NO: 7356 - RNA, 21 nt, Artificial Sequence
  SARM1 targeting guide sequence portion
cgccugcugggcgaggaggug

SEQ ID NO: 7357 - RNA, 21 nt, Artificial Sequence
  SARM1 targeting guide sequence portion
cgccugguuuccuacucuacc

SEQ ID NO: 7358 - RNA, 21 nt, Artificial Sequence
  SARM1 targeting guide sequence portion
cgcgcgcugcgccugcugggc

SEQ ID NO: 7359 - RNA, 21 nt, Artificial Sequence
  SARM1 targeting guide sequence portion
cgcgcgcuuggccagcgccga

SEQ ID NO: 7360 - RNA, 21 nt, Artificial Sequence
  SARM1 targeting guide sequence portion
cgcgcugcgccugcugggcga

SEQ ID NO: 7361 - RNA, 21 nt, Artificial Sequence
  SARM1 targeting guide sequence portion
cgcgcuuggccagcgccgacu

SEQ ID NO: 7362 - RNA, 21 nt, Artificial Sequence
  SARM1 targeting guide sequence portion
cgcugcgccugcugggcgagg

SEQ ID NO: 7363 - RNA, 21 nt, Artificial Sequence
  SARM1 targeting guide sequence portion
cgcuggccaagcgcgcgcugc

SEQ ID NO: 7364 - RNA, 21 nt, Artificial Sequence
  SARM1 targeting guide sequence portion
cgcuuggccagcgccgacuua

SEQ ID NO: 7365 - RNA, 21 nt, Artificial Sequence
  SARM1 targeting guide sequence portion
cggaagcucucgcaguacuug

SEQ ID NO: 7366 - RNA, 21 nt, Artificial Sequence
  SARM1 targeting guide sequence portion
cggagggcaggaugggccgug

SEQ ID NO: 7367 - RNA, 21 nt, Artificial Sequence
  SARM1 targeting guide sequence portion
cggcccauccugcccuccgug

SEQ ID NO: 7368 - RNA, 21 nt, Artificial Sequence
  SARM1 targeting guide sequence portion
cggccuccuuccagcugggca

SEQ ID NO: 7369 - RNA, 21 nt, Artificial Sequence
  SARM1 targeting guide sequence portion
cggcgccauccagagccugaa

SEQ ID NO: 7370 - RNA, 21 nt, Artificial Sequence
  SARM1 targeting guide sequence portion
cgguuucuccaaguacugcga

SEQ ID NO: 7371 - RNA, 21 nt, Artificial Sequence
  SARM1 targeting guide sequence portion
cgucugaaccucggccuccuu

SEQ ID NO: 7372 - RNA, 21 nt, Artificial Sequence
  SARM1 targeting guide sequence portion
cgugcccagcuggaaggaggc

SEQ ID NO: 7373 - RNA, 21 nt, Artificial Sequence
  SARM1 targeting guide sequence portion
cguggcaccuccucgcccagc

SEQ ID NO: 7374 - RNA, 21 nt, Artificial Sequence
  SARM1 targeting guide sequence portion
cguggcugcagcagaucgguu

SEQ ID NO: 7375 - RNA, 21 nt, Artificial Sequence
  SARM1 targeting guide sequence portion
cguuucaggcucuggauggcg

SEQ ID NO: 7376 - RNA, 21 nt, Artificial Sequence
  SARM1 targeting guide sequence portion
cuaagucggcgcuggccaagc

SEQ ID NO: 7377 - RNA, 21 nt, Artificial Sequence
  SARM1 targeting guide sequence portion
cuaccaauggcacuaagucgg

SEQ ID NO: 7378 - RNA, 21 nt, Artificial Sequence
  SARM1 targeting guide sequence portion
cuacccggaagcucucgcagu

SEQ ID NO: 7379 - RNA, 21 nt, Artificial Sequence
  SARM1 targeting guide sequence portion
cuacucuaccaauggcacuaa

SEQ ID NO: 7380 - RNA, 21 nt, Artificial Sequence
  SARM1 targeting guide sequence portion
cuagguguucagcgacaucgg

SEQ ID NO: 7381 - RNA, 21 nt, Artificial Sequence
  SARM1 targeting guide sequence portion
cuccaaguacugcgagagcuu

SEQ ID NO: 7382 - RNA, 21 nt, Artificial Sequence
  SARM1 targeting guide sequence portion
cuccgugcccagcuggaagga

SEQ ID NO: 7383 - RNA, 21 nt, Artificial Sequence
  SARM1 targeting guide sequence portion
cuccucgcccagcaggcgcag

SEQ ID NO: 7384 - RNA, 21 nt, Artificial Sequence
  SARM1 targeting guide sequence portion
cuccuuccagcugggcacgga

SEQ ID NO: 7385 - RNA, 21 nt, Artificial Sequence
  SARM1 targeting guide sequence portion
cucgcaguacuuggagaaacc

SEQ ID NO: 7386 - RNA, 21 nt, Artificial Sequence
  SARM1 targeting guide sequence portion
cucgcccagcaggcgcagcgc

SEQ ID NO: 7387 - RNA, 21 nt, Artificial Sequence
  SARM1 targeting guide sequence portion
cucggccuccuuccagcuggg

SEQ ID NO: 7388 - RNA, 21 nt, Artificial Sequence
  SARM1 targeting guide sequence portion
cucuaccaauggcacuaaguc

SEQ ID NO: 7389 - RNA, 21 nt, Artificial Sequence
  SARM1 targeting guide sequence portion
cucuacccggaagcucucgca

SEQ ID NO: 7390 - RNA, 21 nt, Artificial Sequence
  SARM1 targeting guide sequence portion
cucucgcaguacuuggagaaa

SEQ ID NO: 7391 - RNA, 21 nt, Artificial Sequence
  SARM1 targeting guide sequence portion
cucuggauggcgccgaugucg

SEQ ID NO: 7392 - RNA, 21 nt, Artificial Sequence
  SARM1 targeting guide sequence portion
cugaaacgccugguuuccuac

SEQ ID NO: 7393 - RNA, 21 nt, Artificial Sequence
  SARM1 targeting guide sequence portion
cugaaccucggccuccuucca

SEQ ID NO: 7394 - RNA, 21 nt, Artificial Sequence
  SARM1 targeting guide sequence portion
cugcagcagaucgguuucucc

SEQ ID NO: 7395 - RNA, 21 nt, Artificial Sequence
  SARM1 targeting guide sequence portion
cugcagccacgucugaaccuc

SEQ ID NO: 7396 - RNA, 21 nt, Artificial Sequence
  SARM1 targeting guide sequence portion
cugcccuccgugcccagcugg

SEQ ID NO: 7397 - RNA, 21 nt, Artificial Sequence
  SARM1 targeting guide sequence portion
cugcgccugcugggcgaggag

SEQ ID NO: 7398 - RNA, 21 nt, Artificial Sequence
  SARM1 targeting guide sequence portion
cugcugcagccacgucugaac

SEQ ID NO: 7399 - RNA, 21 nt, Artificial Sequence
  SARM1 targeting guide sequence portion
cugcugggcgaggaggugcca

SEQ ID NO: 7400 - RNA, 21 nt, Artificial Sequence
  SARM1 targeting guide sequence portion
cuggaaggaggccgagguuca

SEQ ID NO: 7401 - RNA, 21 nt, Artificial Sequence
  SARM1 targeting guide sequence portion
cuggauggcgccgaugucgcu

SEQ ID NO: 7402 - RNA, 21 nt, Artificial Sequence
  SARM1 targeting guide sequence portion
cuggccaagcgcgcgcugcgc

SEQ ID NO: 7403 - RNA, 21 nt, Artificial Sequence
  SARM1 targeting guide sequence portion
cugggcacggagggcaggaug

SEQ ID NO: 7404 - RNA, 21 nt, Artificial Sequence
  SARM1 targeting guide sequence portion
cugggcgaggaggugccacgg

SEQ ID NO: 7405 - RNA, 21 nt, Artificial Sequence
  SARM1 targeting guide sequence portion
cugguuuccuacucuaccaau

SEQ ID NO: 7406 - RNA, 21 nt, Artificial Sequence
  SARM1 targeting guide sequence portion
cuuagugccauugguagagua

SEQ ID NO: 7407 - RNA, 21 nt, Artificial Sequence
  SARM1 targeting guide sequence portion
cuuccagcugggcacggaggg

SEQ ID NO: 7408 - RNA, 21 nt, Artificial Sequence
  SARM1 targeting guide sequence portion
cuuggagaaaccgaucugcug

SEQ ID NO: 7409 - RNA, 21 nt, Artificial Sequence
  SARM1 targeting guide sequence portion
cuuggccagcgccgacuuagu

SEQ ID NO: 7410 - RNA, 21 nt, Artificial Sequence
  SARM1 targeting guide sequence portion
gaaaccaggcguuucaggcuc

SEQ ID NO: 7411 - RNA, 21 nt, Artificial Sequence
  SARM1 targeting guide sequence portion
gaaaccgaucugcugcagcca

SEQ ID NO: 7412 - RNA, 21 nt, Artificial Sequence
  SARM1 targeting guide sequence portion
gaaacgccugguuuccuacuc

SEQ ID NO: 7413 - RNA, 21 nt, Artificial Sequence
  SARM1 targeting guide sequence portion
gaaccucggccuccuuccagc

SEQ ID NO: 7414 - RNA, 21 nt, Artificial Sequence
  SARM1 targeting guide sequence portion
gaagcucucgcaguacuugga

SEQ ID NO: 7415 - RNA, 21 nt, Artificial Sequence
  SARM1 targeting guide sequence portion
gaaggaggccgagguucagac

SEQ ID NO: 7416 - RNA, 21 nt, Artificial Sequence
  SARM1 targeting guide sequence portion
gacaucggcgccauccagagc

SEQ ID NO: 7417 - RNA, 21 nt, Artificial Sequence
  SARM1 targeting guide sequence portion
gacguggcugcagcagaucgg

SEQ ID NO: 7418 - RNA, 21 nt, Artificial Sequence
  SARM1 targeting guide sequence portion
gacuuagugccauugguagag

SEQ ID NO: 7419 - RNA, 21 nt, Artificial Sequence
  SARM1 targeting guide sequence portion
gagaaaccgaucugcugcagc

SEQ ID NO: 7420 - RNA, 21 nt, Artificial Sequence
  SARM1 targeting guide sequence portion
gagccugaaacgccugguuuc

SEQ ID NO: 7421 - RNA, 21 nt, Artificial Sequence
  SARM1 targeting guide sequence portion
gaggaggugccacggcccauc

SEQ ID NO: 7422 - RNA, 21 nt, Artificial Sequence
  SARM1 targeting guide sequence portion
gaggccgagguucagacgugg

SEQ ID NO: 7423 - RNA, 21 nt, Artificial Sequence
  SARM1 targeting guide sequence portion
gagggcaggaugggccguggc

SEQ ID NO: 7424 - RNA, 21 nt, Artificial Sequence
  SARM1 targeting guide sequence portion
gaggugccacggcccauccug

SEQ ID NO: 7425 - RNA, 21 nt, Artificial Sequence
  SARM1 targeting guide sequence portion
gagguucagacguggcugcag

SEQ ID NO: 7426 - RNA, 21 nt, Artificial Sequence
  SARM1 targeting guide sequence portion
gaguaggaaaccaggcguuuc

SEQ ID NO: 7427 - RNA, 21 nt, Artificial Sequence
  SARM1 targeting guide sequence portion
gaucgguuucuccaaguacug

SEQ ID NO: 7428 - RNA, 21 nt, Artificial Sequence
  SARM1 targeting guide sequence portion
gaucugcugcagccacgucug

SEQ ID NO: 7429 - RNA, 21 nt, Artificial Sequence
  SARM1 targeting guide sequence portion
gauggcgccgaugucgcugaa

SEQ ID NO: 7430 - RNA, 21 nt, Artificial Sequence
  SARM1 targeting guide sequence portion
gaugggccguggcaccuccuc

SEQ ID NO: 7431 - RNA, 21 nt, Artificial Sequence
  SARM1 targeting guide sequence portion
gcaccuccucgcccagcaggc

SEQ ID NO: 7432 - RNA, 21 nt, Artificial Sequence
  SARM1 targeting guide sequence portion
gcacggagggcaggaugggcc

SEQ ID NO: 7433 - RNA, 21 nt, Artificial Sequence
  SARM1 targeting guide sequence portion
gcacuaagucggcgcuggcca

SEQ ID NO: 7434 - RNA, 21 nt, Artificial Sequence
  SARM1 targeting guide sequence portion
gcagaucgguuucuccaagua

SEQ ID NO: 7435 - RNA, 21 nt, Artificial Sequence
  SARM1 targeting guide sequence portion
gcagcagaucgguuucuccaa

SEQ ID NO: 7436 - RNA, 21 nt, Artificial Sequence
  SARM1 targeting guide sequence portion
gcagccacgucugaaccucgg

SEQ ID NO: 7437 - RNA, 21 nt, Artificial Sequence
  SARM1 targeting guide sequence portion
gcagcgcgcgcuuggccagcg

SEQ ID NO: 7438 - RNA, 21 nt, Artificial Sequence
  SARM1 targeting guide sequence portion
gcaggaugggccguggcaccu

SEQ ID NO: 7439 - RNA, 21 nt, Artificial Sequence
  SARM1 targeting guide sequence portion
gcaggcgcagcgcgcgcuugg

SEQ ID NO: 7440 - RNA, 21 nt, Artificial Sequence
  SARM1 targeting guide sequence portion
gcaguacuuggagaaaccgau

SEQ ID NO: 7441 - RNA, 21 nt, Artificial Sequence
  SARM1 targeting guide sequence portion
gccaagcgcgcgcugcgccug

SEQ ID NO: 7442 - RNA, 21 nt, Artificial Sequence
  SARM1 targeting guide sequence portion
gccacggcccauccugcccuc

SEQ ID NO: 7443 - RNA, 21 nt, Artificial Sequence
  SARM1 targeting guide sequence portion
gccacgucugaaccucggccu

SEQ ID NO: 7444 - RNA, 21 nt, Artificial Sequence
  SARM1 targeting guide sequence portion
gccagcgccgacuuagugcca

SEQ ID NO: 7445 - RNA, 21 nt, Artificial Sequence
  SARM1 targeting guide sequence portion
gccauccagagccugaaacgc

SEQ ID NO: 7446 - RNA, 21 nt, Artificial Sequence
  SARM1 targeting guide sequence portion
gccauugguagaguaggaaac

SEQ ID NO: 7447 - RNA, 21 nt, Artificial Sequence
  SARM1 targeting guide sequence portion
gcccagcaggcgcagcgcgcg

SEQ ID NO: 7448 - RNA, 21 nt, Artificial Sequence
  SARM1 targeting guide sequence portion
gcccagcuggaaggaggccga

SEQ ID NO: 7449 - RNA, 21 nt, Artificial Sequence
  SARM1 targeting guide sequence portion
gcccauccugcccuccgugcc

SEQ ID NO: 7450 - RNA, 21 nt, Artificial Sequence
  SARM1 targeting guide sequence portion
gcccuccgugcccagcuggaa

SEQ ID NO: 7451 - RNA, 21 nt, Artificial Sequence
  SARM1 targeting guide sequence portion
gccgacuuagugccauuggua

SEQ ID NO: 7452 - RNA, 21 nt, Artificial Sequence
  SARM1 targeting guide sequence portion
gccgagguucagacguggcug

SEQ ID NO: 7453 - RNA, 21 nt, Artificial Sequence
  SARM1 targeting guide sequence portion
gccguggcaccuccucgccca

SEQ ID NO: 7454 - RNA, 21 nt, Artificial Sequence
  SARM1 targeting guide sequence portion
gccuccuuccagcugggcacg

SEQ ID NO: 7455 - RNA, 21 nt, Artificial Sequence
  SARM1 targeting guide sequence portion
gccugaaacgccugguuuccu

SEQ ID NO: 7456 - RNA, 21 nt, Artificial Sequence
  SARM1 targeting guide sequence portion
gccugcugggcgaggaggugc

SEQ ID NO: 7457 - RNA, 21 nt, Artificial Sequence
  SARM1 targeting guide sequence portion
gccugguuuccuacucuacca

SEQ ID NO: 7458 - RNA, 21 nt, Artificial Sequence
  SARM1 targeting guide sequence portion
gcgacaucggcgccauccaga

SEQ ID NO: 7459 - RNA, 21 nt, Artificial Sequence
  SARM1 targeting guide sequence portion
gcgaggaggugccacggccca

SEQ ID NO: 7460 - RNA, 21 nt, Artificial Sequence
  SARM1 targeting guide sequence portion
gcgcagcgcgcgcuuggccag

SEQ ID NO: 7461 - RNA, 21 nt, Artificial Sequence
  SARM1 targeting guide sequence portion
gcgccauccagagccugaaac

SEQ ID NO: 7462 - RNA, 21 nt, Artificial Sequence
  SARM1 targeting guide sequence portion
gcgccgacuuagugccauugg

SEQ ID NO: 7463 - RNA, 21 nt, Artificial Sequence
  SARM1 targeting guide sequence portion
gcgccgaugucgcugaacacc

SEQ ID NO: 7464 - RNA, 21 nt, Artificial Sequence
  SARM1 targeting guide sequence portion
gcgccugcugggcgaggaggu

SEQ ID NO: 7465 - RNA, 21 nt, Artificial Sequence
  SARM1 targeting guide sequence portion
gcgcgcgcugcgccugcuggg

SEQ ID NO: 7466 - RNA, 21 nt, Artificial Sequence
  SARM1 targeting guide sequence portion
gcgcgcgcuuggccagcgccg

SEQ ID NO: 7467 - RNA, 21 nt, Artificial Sequence
  SARM1 targeting guide sequence portion
gcgcgcugcgccugcugggcg

SEQ ID NO: 7468 - RNA, 21 nt, Artificial Sequence
  SARM1 targeting guide sequence portion
gcgcgcuuggccagcgccgac

SEQ ID NO: 7469 - RNA, 21 nt, Artificial Sequence
  SARM1 targeting guide sequence portion
gcgcugcgccugcugggcgag

SEQ ID NO: 7470 - RNA, 21 nt, Artificial Sequence
  SARM1 targeting guide sequence portion
gcgcuggccaagcgcgcgcug

SEQ ID NO: 7471 - RNA, 21 nt, Artificial Sequence
  SARM1 targeting guide sequence portion
gcgcuuggccagcgccgacuu

SEQ ID NO: 7472 - RNA, 21 nt, Artificial Sequence
  SARM1 targeting guide sequence portion
gcguuucaggcucuggauggc

SEQ ID NO: 7473 - RNA, 21 nt, Artificial Sequence
  SARM1 targeting guide sequence portion
gcucucgcaguacuuggagaa

SEQ ID NO: 7474 - RNA, 21 nt, Artificial Sequence
  SARM1 targeting guide sequence portion
gcucuggauggcgccgauguc

SEQ ID NO: 7475 - RNA, 21 nt, Artificial Sequence
  SARM1 targeting guide sequence portion
gcugcagcagaucgguuucuc

SEQ ID NO: 7476 - RNA, 21 nt, Artificial Sequence
  SARM1 targeting guide sequence portion
gcugcagccacgucugaaccu

SEQ ID NO: 7477 - RNA, 21 nt, Artificial Sequence
  SARM1 targeting guide sequence portion
gcugcgccugcugggcgagga

SEQ ID NO: 7478 - RNA, 21 nt, Artificial Sequence
  SARM1 targeting guide sequence portion
gcuggaaggaggccgagguuc

SEQ ID NO: 7479 - RNA, 21 nt, Artificial Sequence
  SARM1 targeting guide sequence portion
gcuggccaagcgcgcgcugcg

SEQ ID NO: 7480 - RNA, 21 nt, Artificial Sequence
  SARM1 targeting guide sequence portion
gcugggcacggagggcaggau

SEQ ID NO: 7481 - RNA, 21 nt, Artificial Sequence
  SARM1 targeting guide sequence portion
gcugggcgaggaggugccacg

SEQ ID NO: 7482 - RNA, 21 nt, Artificial Sequence
  SARM1 targeting guide sequence portion
gcuuggccagcgccgacuuag

SEQ ID NO: 7483 - RNA, 21 nt, Artificial Sequence
  SARM1 targeting guide sequence portion
ggaaaccaggcguuucaggcu

SEQ ID NO: 7484 - RNA, 21 nt, Artificial Sequence
  SARM1 targeting guide sequence portion
ggaagcucucgcaguacuugg

SEQ ID NO: 7485 - RNA, 21 nt, Artificial Sequence
  SARM1 targeting guide sequence portion
ggaaggaggccgagguucaga

SEQ ID NO: 7486 - RNA, 21 nt, Artificial Sequence
  SARM1 targeting guide sequence portion
ggagaaaccgaucugcugcag

SEQ ID NO: 7487 - RNA, 21 nt, Artificial Sequence
  SARM1 targeting guide sequence portion
ggaggccgagguucagacgug

SEQ ID NO: 7488 - RNA, 21 nt, Artificial Sequence
  SARM1 targeting guide sequence portion
ggagggcaggaugggccgugg

SEQ ID NO: 7489 - RNA, 21 nt, Artificial Sequence
  SARM1 targeting guide sequence portion
ggaggugccacggcccauccu

SEQ ID NO: 7490 - RNA, 21 nt, Artificial Sequence
  SARM1 targeting guide sequence portion
ggauggcgccgaugucgcuga

SEQ ID NO: 7491 - RNA, 21 nt, Artificial Sequence
  SARM1 targeting guide sequence portion
ggaugggccguggcaccuccu

SEQ ID NO: 7492 - RNA, 21 nt, Artificial Sequence
  SARM1 targeting guide sequence portion
ggcaccuccucgcccagcagg

SEQ ID NO: 7493 - RNA, 21 nt, Artificial Sequence
  SARM1 targeting guide sequence portion
ggcacggagggcaggaugggc

SEQ ID NO: 7494 - RNA, 21 nt, Artificial Sequence
  SARM1 targeting guide sequence portion
ggcacuaagucggcgcuggcc

SEQ ID NO: 7495 - RNA, 21 nt, Artificial Sequence
  SARM1 targeting guide sequence portion
ggcaggaugggccguggcacc

SEQ ID NO: 7496 - RNA, 21 nt, Artificial Sequence
  SARM1 targeting guide sequence portion
ggccaagcgcgcgcugcgccu

SEQ ID NO: 7497 - RNA, 21 nt, Artificial Sequence
  SARM1 targeting guide sequence portion
ggccagcgccgacuuagugcc

SEQ ID NO: 7498 - RNA, 21 nt, Artificial Sequence
  SARM1 targeting guide sequence portion
ggcccauccugcccuccgugc

SEQ ID NO: 7499 - RNA, 21 nt, Artificial Sequence
  SARM1 targeting guide sequence portion
ggccgagguucagacguggcu

SEQ ID NO: 7500 - RNA, 21 nt, Artificial Sequence
  SARM1 targeting guide sequence portion
ggccguggcaccuccucgccc

SEQ ID NO: 7501 - RNA, 21 nt, Artificial Sequence
  SARM1 targeting guide sequence portion
ggccuccuuccagcugggcac

SEQ ID NO: 7502 - RNA, 21 nt, Artificial Sequence
  SARM1 targeting guide sequence portion
ggcgaggaggugccacggccc

SEQ ID NO: 7503 - RNA, 21 nt, Artificial Sequence
  SARM1 targeting guide sequence portion
ggcgccauccagagccugaaa

SEQ ID NO: 7504 - RNA, 21 nt, Artificial Sequence
  SARM1 targeting guide sequence portion
ggcgccgaugucgcugaacac

SEQ ID NO: 7505 - RNA, 21 nt, Artificial Sequence
  SARM1 targeting guide sequence portion
ggcgcuggccaagcgcgcgcu

SEQ ID NO: 7506 - RNA, 21 nt, Artificial Sequence
  SARM1 targeting guide sequence portion
ggcguuucaggcucuggaugg

SEQ ID NO: 7507 - RNA, 21 nt, Artificial Sequence
  SARM1 targeting guide sequence portion
ggcucuggauggcgccgaugu

SEQ ID NO: 7508 - RNA, 21 nt, Artificial Sequence
  SARM1 targeting guide sequence portion
ggcugcagcagaucgguuucu

SEQ ID NO: 7509 - RNA, 21 nt, Artificial Sequence
  SARM1 targeting guide sequence portion
gggcacggagggcaggauggg

SEQ ID NO: 7510 - RNA, 21 nt, Artificial Sequence
  SARM1 targeting guide sequence portion
gggcaggaugggccguggcac

SEQ ID NO: 7511 - RNA, 21 nt, Artificial Sequence
  SARM1 targeting guide sequence portion
gggccguggcaccuccucgcc

SEQ ID NO: 7512 - RNA, 21 nt, Artificial Sequence
  SARM1 targeting guide sequence portion
gggcgaggaggugccacggcc

SEQ ID NO: 7513 - RNA, 21 nt, Artificial Sequence
  SARM1 targeting guide sequence portion
gguagaguaggaaaccaggcg

SEQ ID NO: 7514 - RNA, 21 nt, Artificial Sequence
  SARM1 targeting guide sequence portion
ggugccacggcccauccugcc

SEQ ID NO: 7515 - RNA, 21 nt, Artificial Sequence
  SARM1 targeting guide sequence portion
gguguucagcgacaucggcgc

SEQ ID NO: 7516 - RNA, 21 nt, Artificial Sequence
  SARM1 targeting guide sequence portion
gguucagacguggcugcagca

SEQ ID NO: 7517 - RNA, 21 nt, Artificial Sequence
  SARM1 targeting guide sequence portion
gguuuccuacucuaccaaugg

SEQ ID NO: 7518 - RNA, 21 nt, Artificial Sequence
  SARM1 targeting guide sequence portion
gguuucuccaaguacugcgag

SEQ ID NO: 7519 - RNA, 21 nt, Artificial Sequence
  SARM1 targeting guide sequence portion
guacuuggagaaaccgaucug

SEQ ID NO: 7520 - RNA, 21 nt, Artificial Sequence
  SARM1 targeting guide sequence portion
guagaguaggaaaccaggcgu

SEQ ID NO: 7521 - RNA, 21 nt, Artificial Sequence
  SARM1 targeting guide sequence portion
guaggaaaccaggcguuucag

SEQ ID NO: 7522 - RNA, 21 nt, Artificial Sequence
  SARM1 targeting guide sequence portion
gucggcgcuggccaagcgcgc

SEQ ID NO: 7523 - RNA, 21 nt, Artificial Sequence
  SARM1 targeting guide sequence portion
gucugaaccucggccuccuuc

SEQ ID NO: 7524 - RNA, 21 nt, Artificial Sequence
  SARM1 targeting guide sequence portion
gugccacggcccauccugccc

SEQ ID NO: 7525 - RNA, 21 nt, Artificial Sequence
  SARM1 targeting guide sequence portion
gugccauugguagaguaggaa

SEQ ID NO: 7526 - RNA, 21 nt, Artificial Sequence
  SARM1 targeting guide sequence portion
gugcccagcuggaaggaggcc

SEQ ID NO: 7527 - RNA, 21 nt, Artificial Sequence
  SARM1 targeting guide sequence portion
guggcaccuccucgcccagca

SEQ ID NO: 7528 - RNA, 21 nt, Artificial Sequence
  SARM1 targeting guide sequence portion
guggcugcagcagaucgguuu

SEQ ID NO: 7529 - RNA, 21 nt, Artificial Sequence
  SARM1 targeting guide sequence portion
guguucagcgacaucggcgcc

SEQ ID NO: 7530 - RNA, 21 nt, Artificial Sequence
  SARM1 targeting guide sequence portion
guucagacguggcugcagcag

SEQ ID NO: 7531 - RNA, 21 nt, Artificial Sequence
  SARM1 targeting guide sequence portion
guucagcgacaucggcgccau

SEQ ID NO: 7532 - RNA, 21 nt, Artificial Sequence
  SARM1 targeting guide sequence portion
guuucaggcucuggauggcgc

SEQ ID NO: 7533 - RNA, 21 nt, Artificial Sequence
  SARM1 targeting guide sequence portion
guuuccuacucuaccaauggc

SEQ ID NO: 7534 - RNA, 21 nt, Artificial Sequence
  SARM1 targeting guide sequence portion
guuucuccaaguacugcgaga

SEQ ID NO: 7535 - RNA, 21 nt, Artificial Sequence
  SARM1 targeting guide sequence portion
uaagucggcgcuggccaagcg

SEQ ID NO: 7536 - RNA, 21 nt, Artificial Sequence
  SARM1 targeting guide sequence portion
uaccaauggcacuaagucggc

SEQ ID NO: 7537 - RNA, 21 nt, Artificial Sequence
  SARM1 targeting guide sequence portion
uacccggaagcucucgcagua

SEQ ID NO: 7538 - RNA, 21 nt, Artificial Sequence
  SARM1 targeting guide sequence portion
uacucuaccaauggcacuaag

SEQ ID NO: 7539 - RNA, 21 nt, Artificial Sequence
  SARM1 targeting guide sequence portion
uacuuggagaaaccgaucugc

SEQ ID NO: 7540 - RNA, 21 nt, Artificial Sequence
  SARM1 targeting guide sequence portion
uagaguaggaaaccaggcguu

SEQ ID NO: 7541 - RNA, 21 nt, Artificial Sequence
  SARM1 targeting guide sequence portion
uaggaaaccaggcguuucagg

SEQ ID NO: 7542 - RNA, 21 nt, Artificial Sequence
  SARM1 targeting guide sequence portion
uagguguucagcgacaucggc

SEQ ID NO: 7543 - RNA, 21 nt, Artificial Sequence
  SARM1 targeting guide sequence portion
uagugccauugguagaguagg

SEQ ID NO: 7544 - RNA, 21 nt, Artificial Sequence
  SARM1 targeting guide sequence portion
ucagacguggcugcagcagau

SEQ ID NO: 7545 - RNA, 21 nt, Artificial Sequence
  SARM1 targeting guide sequence portion
ucagcgacaucggcgccaucc

SEQ ID NO: 7546 - RNA, 21 nt, Artificial Sequence
  SARM1 targeting guide sequence portion
ucaggcucuggauggcgccga

SEQ ID NO: 7547 - RNA, 21 nt, Artificial Sequence
  SARM1 targeting guide sequence portion
uccaaguacugcgagagcuuc

SEQ ID NO: 7548 - RNA, 21 nt, Artificial Sequence
  SARM1 targeting guide sequence portion
uccagagccugaaacgccugg

SEQ ID NO: 7549 - RNA, 21 nt, Artificial Sequence
  SARM1 targeting guide sequence portion
uccagcugggcacggagggca

SEQ ID NO: 7550 - RNA, 21 nt, Artificial Sequence
  SARM1 targeting guide sequence portion
ucccuagguguucagcgacau

SEQ ID NO: 7551 - RNA, 21 nt, Artificial Sequence
  SARM1 targeting guide sequence portion
uccgugcccagcuggaaggag

SEQ ID NO: 7552 - RNA, 21 nt, Artificial Sequence
  SARM1 targeting guide sequence portion
uccuacucuaccaauggcacu

SEQ ID NO: 7553 - RNA, 21 nt, Artificial Sequence
  SARM1 targeting guide sequence portion
uccucgcccagcaggcgcagc

SEQ ID NO: 7554 - RNA, 21 nt, Artificial Sequence
  SARM1 targeting guide sequence portion
uccugcccuccgugcccagcu

SEQ ID NO: 7555 - RNA, 21 nt, Artificial Sequence
  SARM1 targeting guide sequence portion
uccuuccagcugggcacggag

SEQ ID NO: 7556 - RNA, 21 nt, Artificial Sequence
  SARM1 targeting guide sequence portion
ucgcaguacuuggagaaaccg

SEQ ID NO: 7557 - RNA, 21 nt, Artificial Sequence
  SARM1 targeting guide sequence portion
ucgcccagcaggcgcagcgcg

SEQ ID NO: 7558 - RNA, 21 nt, Artificial Sequence
  SARM1 targeting guide sequence portion
ucggccuccuuccagcugggc

SEQ ID NO: 7559 - RNA, 21 nt, Artificial Sequence
  SARM1 targeting guide sequence portion
ucggcgccauccagagccuga

SEQ ID NO: 7560 - RNA, 21 nt, Artificial Sequence
  SARM1 targeting guide sequence portion
ucggcgcuggccaagcgcgcg

SEQ ID NO: 7561 - RNA, 21 nt, Artificial Sequence
  SARM1 targeting guide sequence portion
ucgguuucuccaaguacugcg

SEQ ID NO: 7562 - RNA, 21 nt, Artificial Sequence
  SARM1 targeting guide sequence portion
ucuaccaauggcacuaagucg

SEQ ID NO: 7563 - RNA, 21 nt, Artificial Sequence
  SARM1 targeting guide sequence portion
ucuacccggaagcucucgcag

SEQ ID NO: 7564 - RNA, 21 nt, Artificial Sequence
  SARM1 targeting guide sequence portion
ucuccaaguacugcgagagcu

SEQ ID NO: 7565 - RNA, 21 nt, Artificial Sequence
  SARM1 targeting guide sequence portion
ucucgcaguacuuggagaaac

SEQ ID NO: 7566 - RNA, 21 nt, Artificial Sequence
  SARM1 targeting guide sequence portion
ucugaaccucggccuccuucc

SEQ ID NO: 7567 - RNA, 21 nt, Artificial Sequence
  SARM1 targeting guide sequence portion
ucugcugcagccacgucugaa

SEQ ID NO: 7568 - RNA, 21 nt, Artificial Sequence
  SARM1 targeting guide sequence portion
ucuggauggcgccgaugucgc

SEQ ID NO: 7569 - RNA, 21 nt, Artificial Sequence
  SARM1 targeting guide sequence portion
ugaaacgccugguuuccuacu

SEQ ID NO: 7570 - RNA, 21 nt, Artificial Sequence
  SARM1 targeting guide sequence portion
ugaaccucggccuccuuccag

SEQ ID NO: 7571 - RNA, 21 nt, Artificial Sequence
  SARM1 targeting guide sequence portion
ugcagcagaucgguuucucca

SEQ ID NO: 7572 - RNA, 21 nt, Artificial Sequence
  SARM1 targeting guide sequence portion
ugcagccacgucugaaccucg

SEQ ID NO: 7573 - RNA, 21 nt, Artificial Sequence
  SARM1 targeting guide sequence portion
ugccacggcccauccugcccu

SEQ ID NO: 7574 - RNA, 21 nt, Artificial Sequence
  SARM1 targeting guide sequence portion
ugccauugguagaguaggaaa

SEQ ID NO: 7575 - RNA, 21 nt, Artificial Sequence
  SARM1 targeting guide sequence portion
ugcccagcuggaaggaggccg

SEQ ID NO: 7576 - RNA, 21 nt, Artificial Sequence
  SARM1 targeting guide sequence portion
ugcccuccgugcccagcugga

SEQ ID NO: 7577 - RNA, 21 nt, Artificial Sequence
  SARM1 targeting guide sequence portion
ugcgccugcugggcgaggagg

SEQ ID NO: 7578 - RNA, 21 nt, Artificial Sequence
  SARM1 targeting guide sequence portion
ugcugcagccacgucugaacc

SEQ ID NO: 7579 - RNA, 21 nt, Artificial Sequence
  SARM1 targeting guide sequence portion
ugcugggcgaggaggugccac

SEQ ID NO: 7580 - RNA, 21 nt, Artificial Sequence
  SARM1 targeting guide sequence portion
uggaaggaggccgagguucag

SEQ ID NO: 7581 - RNA, 21 nt, Artificial Sequence
  SARM1 targeting guide sequence portion
uggagaaaccgaucugcugca

SEQ ID NO: 7582 - RNA, 21 nt, Artificial Sequence
  SARM1 targeting guide sequence portion
uggauggcgccgaugucgcug

SEQ ID NO: 7583 - RNA, 21 nt, Artificial Sequence
  SARM1 targeting guide sequence portion
uggcaccuccucgcccagcag

SEQ ID NO: 7584 - RNA, 21 nt, Artificial Sequence
  SARM1 targeting guide sequence portion
uggcacuaagucggcgcuggc

SEQ ID NO: 7585 - RNA, 21 nt, Artificial Sequence
  SARM1 targeting guide sequence portion
uggccaagcgcgcgcugcgcc

SEQ ID NO: 7586 - RNA, 21 nt, Artificial Sequence
  SARM1 targeting guide sequence portion
uggccagcgccgacuuagugc

SEQ ID NO: 7587 - RNA, 21 nt, Artificial Sequence
  SARM1 targeting guide sequence portion
uggcgccgaugucgcugaaca

SEQ ID NO: 7588 - RNA, 21 nt, Artificial Sequence
  SARM1 targeting guide sequence portion
uggcugcagcagaucgguuuc

SEQ ID NO: 7589 - RNA, 21 nt, Artificial Sequence
  SARM1 targeting guide sequence portion
ugggcacggagggcaggaugg

SEQ ID NO: 7590 - RNA, 21 nt, Artificial Sequence
  SARM1 targeting guide sequence portion
ugggccguggcaccuccucgc

SEQ ID NO: 7591 - RNA, 21 nt, Artificial Sequence
  SARM1 targeting guide sequence portion
ugggcgaggaggugccacggc

SEQ ID NO: 7592 - RNA, 21 nt, Artificial Sequence
  SARM1 targeting guide sequence portion
ugguagaguaggaaaccaggc

SEQ ID NO: 7593 - RNA, 21 nt, Artificial Sequence
  SARM1 targeting guide sequence portion
ugguuuccuacucuaccaaug

SEQ ID NO: 7594 - RNA, 21 nt, Artificial Sequence
  SARM1 targeting guide sequence portion
uguucagcgacaucggcgcca

SEQ ID NO: 7595 - RNA, 21 nt, Artificial Sequence
  SARM1 targeting guide sequence portion
uuagugccauugguagaguag

SEQ ID NO: 7596 - RNA, 21 nt, Artificial Sequence
  SARM1 targeting guide sequence portion
uucagacguggcugcagcaga

SEQ ID NO: 7597 - RNA, 21 nt, Artificial Sequence
  SARM1 targeting guide sequence portion
uucagcgacaucggcgccauc

SEQ ID NO: 7598 - RNA, 21 nt, Artificial Sequence
  SARM1 targeting guide sequence portion
uucaggcucuggauggcgccg

SEQ ID NO: 7599 - RNA, 21 nt, Artificial Sequence
  SARM1 targeting guide sequence portion
uuccagcugggcacggagggc

SEQ ID NO: 7600 - RNA, 21 nt, Artificial Sequence
  SARM1 targeting guide sequence portion
uuccuacucuaccaauggcac

SEQ ID NO: 7601 - RNA, 21 nt, Artificial Sequence
  SARM1 targeting guide sequence portion
uucuccaaguacugcgagagc

SEQ ID NO: 7602 - RNA, 21 nt, Artificial Sequence
  SARM1 targeting guide sequence portion
uuggagaaaccgaucugcugc

SEQ ID NO: 7603 - RNA, 21 nt, Artificial Sequence
  SARM1 targeting guide sequence portion
uuggccagcgccgacuuagug

SEQ ID NO: 7604 - RNA, 21 nt, Artificial Sequence
  SARM1 targeting guide sequence portion
uugguagaguaggaaaccagg

SEQ ID NO: 7605 - RNA, 21 nt, Artificial Sequence
  SARM1 targeting guide sequence portion
uuucaggcucuggauggcgcc

SEQ ID NO: 7606 - RNA, 21 nt, Artificial Sequence
  SARM1 targeting guide sequence portion
uuuccuacucuaccaauggca

SEQ ID NO: 7607 - RNA, 21 nt, Artificial Sequence
  SARM1 targeting guide sequence portion
uuucuccaaguacugcgagag

SEQ ID NO: 7608 - RNA, 22 nt, Artificial Sequence
  SARM1 targeting guide sequence portion
aaaccaggcguuucaggcucug

SEQ ID NO: 7609 - RNA, 22 nt, Artificial Sequence
  SARM1 targeting guide sequence portion
aaaccgaucugcugcagccacg

SEQ ID NO: 7610 - RNA, 22 nt, Artificial Sequence
  SARM1 targeting guide sequence portion
aaacgccugguuuccuacucua

SEQ ID NO: 7611 - RNA, 22 nt, Artificial Sequence
  SARM1 targeting guide sequence portion
aaccaggcguuucaggcucugg

SEQ ID NO: 7612 - RNA, 22 nt, Artificial Sequence
  SARM1 targeting guide sequence portion
aaccgaucugcugcagccacgu

SEQ ID NO: 7613 - RNA, 22 nt, Artificial Sequence
  SARM1 targeting guide sequence portion
aaccucggccuccuuccagcug

SEQ ID NO: 7614 - RNA, 22 nt, Artificial Sequence
  SARM1 targeting guide sequence portion
aacgccugguuuccuacucuac

SEQ ID NO: 7615 - RNA, 22 nt, Artificial Sequence
  SARM1 targeting guide sequence portion
aagcgcgcgcugcgccugcugg

SEQ ID NO: 7616 - RNA, 22 nt, Artificial Sequence
  SARM1 targeting guide sequence portion
aagcucucgcaguacuuggaga

SEQ ID NO: 7617 - RNA, 22 nt, Artificial Sequence
  SARM1 targeting guide sequence portion
aaggaggccgagguucagacgu

SEQ ID NO: 7618 - RNA, 22 nt, Artificial Sequence
  SARM1 targeting guide sequence portion
aaguacugcgagagcuuccggg

SEQ ID NO: 7619 - RNA, 22 nt, Artificial Sequence
  SARM1 targeting guide sequence portion
aagucggcgcuggccaagcgcg

SEQ ID NO: 7620 - RNA, 22 nt, Artificial Sequence
  SARM1 targeting guide sequence portion
aauggcacuaagucggcgcugg

SEQ ID NO: 7621 - RNA, 22 nt, Artificial Sequence
  SARM1 targeting guide sequence portion
acaucggcgccauccagagccu

SEQ ID NO: 7622 - RNA, 22 nt, Artificial Sequence
  SARM1 targeting guide sequence portion
accaauggcacuaagucggcgc

SEQ ID NO: 7623 - RNA, 22 nt, Artificial Sequence
  SARM1 targeting guide sequence portion
accaggcguuucaggcucugga

SEQ ID NO: 7624 - RNA, 22 nt, Artificial Sequence
  SARM1 targeting guide sequence portion
acccggaagcucucgcaguacu

SEQ ID NO: 7625 - RNA, 22 nt, Artificial Sequence
  SARM1 targeting guide sequence portion
accgaucugcugcagccacguc

SEQ ID NO: 7626 - RNA, 22 nt, Artificial Sequence
  SARM1 targeting guide sequence portion
accuccucgcccagcaggcgca

SEQ ID NO: 7627 - RNA, 22 nt, Artificial Sequence
  SARM1 targeting guide sequence portion
accucggccuccuuccagcugg

SEQ ID NO: 7628 - RNA, 22 nt, Artificial Sequence
  SARM1 targeting guide sequence portion
acgccugguuuccuacucuacc

SEQ ID NO: 7629 - RNA, 22 nt, Artificial Sequence
  SARM1 targeting guide sequence portion
acggagggcaggaugggccgug

SEQ ID NO: 7630 - RNA, 22 nt, Artificial Sequence
  SARM1 targeting guide sequence portion
acggcccauccugcccuccgug

SEQ ID NO: 7631 - RNA, 22 nt, Artificial Sequence
  SARM1 targeting guide sequence portion
acgucugaaccucggccuccuu

SEQ ID NO: 7632 - RNA, 22 nt, Artificial Sequence
  SARM1 targeting guide sequence portion
acguggcugcagcagaucgguu

SEQ ID NO: 7633 - RNA, 22 nt, Artificial Sequence
  SARM1 targeting guide sequence portion
acuaagucggcgcuggccaagc

SEQ ID NO: 7634 - RNA, 22 nt, Artificial Sequence
  SARM1 targeting guide sequence portion
acucuaccaauggcacuaaguc

SEQ ID NO: 7635 - RNA, 22 nt, Artificial Sequence
  SARM1 targeting guide sequence portion
acucuacccggaagcucucgca

SEQ ID NO: 7636 - RNA, 22 nt, Artificial Sequence
  SARM1 targeting guide sequence portion
acuuagugccauugguagagua

SEQ ID NO: 7637 - RNA, 22 nt, Artificial Sequence
  SARM1 targeting guide sequence portion
acuuggagaaaccgaucugcug

SEQ ID NO: 7638 - RNA, 22 nt, Artificial Sequence
  SARM1 targeting guide sequence portion
agaaaccgaucugcugcagcca

SEQ ID NO: 7639 - RNA, 22 nt, Artificial Sequence
  SARM1 targeting guide sequence portion
agacguggcugcagcagaucgg

SEQ ID NO: 7640 - RNA, 22 nt, Artificial Sequence
  SARM1 targeting guide sequence portion
agagccugaaacgccugguuuc

SEQ ID NO: 7641 - RNA, 22 nt, Artificial Sequence
  SARM1 targeting guide sequence portion
agaguaggaaaccaggcguuuc

SEQ ID NO: 7642 - RNA, 22 nt, Artificial Sequence
  SARM1 targeting guide sequence portion
agaucgguuucuccaaguacug

SEQ ID NO: 7643 - RNA, 22 nt, Artificial Sequence
  SARM1 targeting guide sequence portion
agcagaucgguuucuccaagua

SEQ ID NO: 7644 - RNA, 22 nt, Artificial Sequence
  SARM1 targeting guide sequence portion
agcaggcgcagcgcgcgcuugg

SEQ ID NO: 7645 - RNA, 22 nt, Artificial Sequence
  SARM1 targeting guide sequence portion
agccacgucugaaccucggccu

SEQ ID NO: 7646 - RNA, 22 nt, Artificial Sequence
  SARM1 targeting guide sequence portion
agccugaaacgccugguuuccu

SEQ ID NO: 7647 - RNA, 22 nt, Artificial Sequence
  SARM1 targeting guide sequence portion
agcgacaucggcgccauccaga

SEQ ID NO: 7648 - RNA, 22 nt, Artificial Sequence
  SARM1 targeting guide sequence portion
agcgccgacuuagugccauugg

SEQ ID NO: 7649 - RNA, 22 nt, Artificial Sequence
  SARM1 targeting guide sequence portion
agcgcgcgcugcgccugcuggg

SEQ ID NO: 7650 - RNA, 22 nt, Artificial Sequence
  SARM1 targeting guide sequence portion
agcgcgcgcuuggccagcgccg

SEQ ID NO: 7651 - RNA, 22 nt, Artificial Sequence
  SARM1 targeting guide sequence portion
agcucucgcaguacuuggagaa

SEQ ID NO: 7652 - RNA, 22 nt, Artificial Sequence
  SARM1 targeting guide sequence portion
agcuggaaggaggccgagguuc

SEQ ID NO: 7653 - RNA, 22 nt, Artificial Sequence
  SARM1 targeting guide sequence portion
agcugggcacggagggcaggau

SEQ ID NO: 7654 - RNA, 22 nt, Artificial Sequence
  SARM1 targeting guide sequence portion
aggaaaccaggcguuucaggcu

SEQ ID NO: 7655 - RNA, 22 nt, Artificial Sequence
  SARM1 targeting guide sequence portion
aggaggccgagguucagacgug

SEQ ID NO: 7656 - RNA, 22 nt, Artificial Sequence
  SARM1 targeting guide sequence portion
aggaggugccacggcccauccu

SEQ ID NO: 7657 - RNA, 22 nt, Artificial Sequence
  SARM1 targeting guide sequence portion
aggaugggccguggcaccuccu

SEQ ID NO: 7658 - RNA, 22 nt, Artificial Sequence
  SARM1 targeting guide sequence portion
aggccgagguucagacguggcu

SEQ ID NO: 7659 - RNA, 22 nt, Artificial Sequence
  SARM1 targeting guide sequence portion
aggcgcagcgcgcgcuuggcca

SEQ ID NO: 7660 - RNA, 22 nt, Artificial Sequence
  SARM1 targeting guide sequence portion
aggcguuucaggcucuggaugg

SEQ ID NO: 7661 - RNA, 22 nt, Artificial Sequence
  SARM1 targeting guide sequence portion
aggcucuggauggcgccgaugu

SEQ ID NO: 7662 - RNA, 22 nt, Artificial Sequence
  SARM1 targeting guide sequence portion
agggcaggaugggccguggcac

SEQ ID NO: 7663 - RNA, 22 nt, Artificial Sequence
  SARM1 targeting guide sequence portion
aggugccacggcccauccugcc

SEQ ID NO: 7664 - RNA, 22 nt, Artificial Sequence
  SARM1 targeting guide sequence portion
agguguucagcgacaucggcgc

SEQ ID NO: 7665 - RNA, 22 nt, Artificial Sequence
  SARM1 targeting guide sequence portion
agguucagacguggcugcagca

SEQ ID NO: 7666 - RNA, 22 nt, Artificial Sequence
  SARM1 targeting guide sequence portion
aguacuuggagaaaccgaucug

SEQ ID NO: 7667 - RNA, 22 nt, Artificial Sequence
  SARM1 targeting guide sequence portion
aguaggaaaccaggcguuucag

SEQ ID NO: 7668 - RNA, 22 nt, Artificial Sequence
  SARM1 targeting guide sequence portion
agucggcgcuggccaagcgcgc

SEQ ID NO: 7669 - RNA, 22 nt, Artificial Sequence
  SARM1 targeting guide sequence portion
agugccauugguagaguaggaa

SEQ ID NO: 7670 - RNA, 22 nt, Artificial Sequence
  SARM1 targeting guide sequence portion
auccagagccugaaacgccugg

SEQ ID NO: 7671 - RNA, 22 nt, Artificial Sequence
  SARM1 targeting guide sequence portion
auccugcccuccgugcccagcu

SEQ ID NO: 7672 - RNA, 22 nt, Artificial Sequence
  SARM1 targeting guide sequence portion
aucggcgccauccagagccuga

SEQ ID NO: 7673 - RNA, 22 nt, Artificial Sequence
  SARM1 targeting guide sequence portion
aucgguuucuccaaguacugcg

SEQ ID NO: 7674 - RNA, 22 nt, Artificial Sequence
  SARM1 targeting guide sequence portion
aucugcugcagccacgucugaa

SEQ ID NO: 7675 - RNA, 22 nt, Artificial Sequence
  SARM1 targeting guide sequence portion
auggcacuaagucggcgcuggc

SEQ ID NO: 7676 - RNA, 22 nt, Artificial Sequence
  SARM1 targeting guide sequence portion
auggcgccgaugucgcugaaca

SEQ ID NO: 7677 - RNA, 22 nt, Artificial Sequence
  SARM1 targeting guide sequence portion
augggccguggcaccuccucgc

SEQ ID NO: 7678 - RNA, 22 nt, Artificial Sequence
  SARM1 targeting guide sequence portion
auugguagaguaggaaaccagg

SEQ ID NO: 7679 - RNA, 22 nt, Artificial Sequence
  SARM1 targeting guide sequence portion
caagcgcgcgcugcgccugcug

SEQ ID NO: 7680 - RNA, 22 nt, Artificial Sequence
  SARM1 targeting guide sequence portion
caaguacugcgagagcuuccgg

SEQ ID NO: 7681 - RNA, 22 nt, Artificial Sequence
  SARM1 targeting guide sequence portion
caauggcacuaagucggcgcug

SEQ ID NO: 7682 - RNA, 22 nt, Artificial Sequence
  SARM1 targeting guide sequence portion
caccuccucgcccagcaggcgc

SEQ ID NO: 7683 - RNA, 22 nt, Artificial Sequence
  SARM1 targeting guide sequence portion
cacggagggcaggaugggccgu

SEQ ID NO: 7684 - RNA, 22 nt, Artificial Sequence
  SARM1 targeting guide sequence portion
cacggcccauccugcccuccgu

SEQ ID NO: 7685 - RNA, 22 nt, Artificial Sequence
  SARM1 targeting guide sequence portion
cacgucugaaccucggccuccu

SEQ ID NO: 7686 - RNA, 22 nt, Artificial Sequence
  SARM1 targeting guide sequence portion
cacuaagucggcgcuggccaag

SEQ ID NO: 7687 - RNA, 22 nt, Artificial Sequence
  SARM1 targeting guide sequence portion
cagacguggcugcagcagaucg

SEQ ID NO: 7688 - RNA, 22 nt, Artificial Sequence
  SARM1 targeting guide sequence portion
cagagccugaaacgccugguuu

SEQ ID NO: 7689 - RNA, 22 nt, Artificial Sequence
  SARM1 targeting guide sequence portion
cagaucgguuucuccaaguacu

SEQ ID NO: 7690 - RNA, 22 nt, Artificial Sequence
  SARM1 targeting guide sequence portion
cagcagaucgguuucuccaagu

SEQ ID NO: 7691 - RNA, 22 nt, Artificial Sequence
  SARM1 targeting guide sequence portion
cagcaggcgcagcgcgcgcuug

SEQ ID NO: 7692 - RNA, 22 nt, Artificial Sequence
  SARM1 targeting guide sequence portion
cagccacgucugaaccucggcc

SEQ ID NO: 7693 - RNA, 22 nt, Artificial Sequence
  SARM1 targeting guide sequence portion
cagcgacaucggcgccauccag

SEQ ID NO: 7694 - RNA, 22 nt, Artificial Sequence
  SARM1 targeting guide sequence portion
cagcgccgacuuagugccauug

SEQ ID NO: 7695 - RNA, 22 nt, Artificial Sequence
  SARM1 targeting guide sequence portion
cagcgcgcgcuuggccagcgcc

SEQ ID NO: 7696 - RNA, 22 nt, Artificial Sequence
  SARM1 targeting guide sequence portion
cagcuggaaggaggccgagguu

SEQ ID NO: 7697 - RNA, 22 nt, Artificial Sequence
  SARM1 targeting guide sequence portion
cagcugggcacggagggcagga

SEQ ID NO: 7698 - RNA, 22 nt, Artificial Sequence
  SARM1 targeting guide sequence portion
caggaugggccguggcaccucc

SEQ ID NO: 7699 - RNA, 22 nt, Artificial Sequence
  SARM1 targeting guide sequence portion
caggcgcagcgcgcgcuuggcc

SEQ ID NO: 7700 - RNA, 22 nt, Artificial Sequence
  SARM1 targeting guide sequence portion
caggcguuucaggcucuggaug

SEQ ID NO: 7701 - RNA, 22 nt, Artificial Sequence
  SARM1 targeting guide sequence portion
caggcucuggauggcgccgaug

SEQ ID NO: 7702 - RNA, 22 nt, Artificial Sequence
  SARM1 targeting guide sequence portion
caguacuuggagaaaccgaucu

SEQ ID NO: 7703 - RNA, 22 nt, Artificial Sequence
  SARM1 targeting guide sequence portion
cauccagagccugaaacgccug

SEQ ID NO: 7704 - RNA, 22 nt, Artificial Sequence
  SARM1 targeting guide sequence portion
cauccugcccuccgugcccagc

SEQ ID NO: 7705 - RNA, 22 nt, Artificial Sequence
  SARM1 targeting guide sequence portion
caucggcgccauccagagccug

SEQ ID NO: 7706 - RNA, 22 nt, Artificial Sequence
  SARM1 targeting guide sequence portion
cauugguagaguaggaaaccag

SEQ ID NO: 7707 - RNA, 22 nt, Artificial Sequence
  SARM1 targeting guide sequence portion
ccaagcgcgcgcugcgccugcu

SEQ ID NO: 7708 - RNA, 22 nt, Artificial Sequence
  SARM1 targeting guide sequence portion
ccaaguacugcgagagcuuccg

SEQ ID NO: 7709 - RNA, 22 nt, Artificial Sequence
  SARM1 targeting guide sequence portion
ccaauggcacuaagucggcgcu

SEQ ID NO: 7710 - RNA, 22 nt, Artificial Sequence
  SARM1 targeting guide sequence portion
ccacggcccauccugcccuccg

SEQ ID NO: 7711 - RNA, 22 nt, Artificial Sequence
  SARM1 targeting guide sequence portion
ccacgucugaaccucggccucc

SEQ ID NO: 7712 - RNA, 22 nt, Artificial Sequence
  SARM1 targeting guide sequence portion
ccagagccugaaacgccugguu

SEQ ID NO: 7713 - RNA, 22 nt, Artificial Sequence
  SARM1 targeting guide sequence portion
ccagcaggcgcagcgcgcgcuu

SEQ ID NO: 7714 - RNA, 22 nt, Artificial Sequence
  SARM1 targeting guide sequence portion
ccagcgccgacuuagugccauu

SEQ ID NO: 7715 - RNA, 22 nt, Artificial Sequence
  SARM1 targeting guide sequence portion
ccagcuggaaggaggccgaggu

SEQ ID NO: 7716 - RNA, 22 nt, Artificial Sequence
  SARM1 targeting guide sequence portion
ccagcugggcacggagggcagg

SEQ ID NO: 7717 - RNA, 22 nt, Artificial Sequence
  SARM1 targeting guide sequence portion
ccaggcguuucaggcucuggau

SEQ ID NO: 7718 - RNA, 22 nt, Artificial Sequence
  SARM1 targeting guide sequence portion
ccauccagagccugaaacgccu

SEQ ID NO: 7719 - RNA, 22 nt, Artificial Sequence
  SARM1 targeting guide sequence portion
ccauccugcccuccgugcccag

SEQ ID NO: 7720 - RNA, 22 nt, Artificial Sequence
  SARM1 targeting guide sequence portion
ccauugguagaguaggaaacca

SEQ ID NO: 7721 - RNA, 22 nt, Artificial Sequence
  SARM1 targeting guide sequence portion
cccagcaggcgcagcgcgcgcu

SEQ ID NO: 7722 - RNA, 22 nt, Artificial Sequence
  SARM1 targeting guide sequence portion
cccagcuggaaggaggccgagg

SEQ ID NO: 7723 - RNA, 22 nt, Artificial Sequence
  SARM1 targeting guide sequence portion
cccauccugcccuccgugccca

SEQ ID NO: 7724 - RNA, 22 nt, Artificial Sequence
  SARM1 targeting guide sequence portion
cccggaagcucucgcaguacuu

SEQ ID NO: 7725 - RNA, 22 nt, Artificial Sequence
  SARM1 targeting guide sequence portion
cccuagguguucagcgacaucg

SEQ ID NO: 7726 - RNA, 22 nt, Artificial Sequence
  SARM1 targeting guide sequence portion
cccuccgugcccagcuggaagg

SEQ ID NO: 7727 - RNA, 22 nt, Artificial Sequence
  SARM1 targeting guide sequence portion
ccgacuuagugccauugguaga

SEQ ID NO: 7728 - RNA, 22 nt, Artificial Sequence
  SARM1 targeting guide sequence portion
ccgagguucagacguggcugca

SEQ ID NO: 7729 - RNA, 22 nt, Artificial Sequence
  SARM1 targeting guide sequence portion
ccgaucugcugcagccacgucu

SEQ ID NO: 7730 - RNA, 22 nt, Artificial Sequence
  SARM1 targeting guide sequence portion
ccggaagcucucgcaguacuug

SEQ ID NO: 7731 - RNA, 22 nt, Artificial Sequence
  SARM1 targeting guide sequence portion
ccgugcccagcuggaaggaggc

SEQ ID NO: 7732 - RNA, 22 nt, Artificial Sequence
  SARM1 targeting guide sequence portion
ccguggcaccuccucgcccagc

SEQ ID NO: 7733 - RNA, 22 nt, Artificial Sequence
  SARM1 targeting guide sequence portion
ccuacucuaccaauggcacuaa

SEQ ID NO: 7734 - RNA, 22 nt, Artificial Sequence
  SARM1 targeting guide sequence portion
ccuagguguucagcgacaucgg

SEQ ID NO: 7735 - RNA, 22 nt, Artificial Sequence
  SARM1 targeting guide sequence portion
ccuccgugcccagcuggaagga

SEQ ID NO: 7736 - RNA, 22 nt, Artificial Sequence
  SARM1 targeting guide sequence portion
ccuccucgcccagcaggcgcag

SEQ ID NO: 7737 - RNA, 22 nt, Artificial Sequence
  SARM1 targeting guide sequence portion
ccuccuuccagcugggcacgga

SEQ ID NO: 7738 - RNA, 22 nt, Artificial Sequence
  SARM1 targeting guide sequence portion
ccucgcccagcaggcgcagcgc

SEQ ID NO: 7739 - RNA, 22 nt, Artificial Sequence
  SARM1 targeting guide sequence portion
ccucggccuccuuccagcuggg

SEQ ID NO: 7740 - RNA, 22 nt, Artificial Sequence
  SARM1 targeting guide sequence portion
ccugaaacgccugguuuccuac

SEQ ID NO: 7741 - RNA, 22 nt, Artificial Sequence
  SARM1 targeting guide sequence portion
ccugcccuccgugcccagcugg

SEQ ID NO: 7742 - RNA, 22 nt, Artificial Sequence
  SARM1 targeting guide sequence portion
ccugcugggcgaggaggugcca

SEQ ID NO: 7743 - RNA, 22 nt, Artificial Sequence
  SARM1 targeting guide sequence portion
ccugguuuccuacucuaccaau

SEQ ID NO: 7744 - RNA, 22 nt, Artificial Sequence
  SARM1 targeting guide sequence portion
ccuuccagcugggcacggaggg

SEQ ID NO: 7745 - RNA, 22 nt, Artificial Sequence
  SARM1 targeting guide sequence portion
cgacaucggcgccauccagagc

SEQ ID NO: 7746 - RNA, 22 nt, Artificial Sequence
  SARM1 targeting guide sequence portion
cgacuuagugccauugguagag

SEQ ID NO: 7747 - RNA, 22 nt, Artificial Sequence
  SARM1 targeting guide sequence portion
cgaggaggugccacggcccauc

SEQ ID NO: 7748 - RNA, 22 nt, Artificial Sequence
  SARM1 targeting guide sequence portion
cgagguucagacguggcugcag

SEQ ID NO: 7749 - RNA, 22 nt, Artificial Sequence
  SARM1 targeting guide sequence portion
cgaucugcugcagccacgucug

SEQ ID NO: 7750 - RNA, 22 nt, Artificial Sequence
  SARM1 targeting guide sequence portion
cgcagcgcgcgcuuggccagcg

SEQ ID NO: 7751 - RNA, 22 nt, Artificial Sequence
  SARM1 targeting guide sequence portion
cgcaguacuuggagaaaccgau

SEQ ID NO: 7752 - RNA, 22 nt, Artificial Sequence
  SARM1 targeting guide sequence portion
cgccauccagagccugaaacgc

SEQ ID NO: 7753 - RNA, 22 nt, Artificial Sequence
  SARM1 targeting guide sequence portion
cgcccagcaggcgcagcgcgcg

SEQ ID NO: 7754 - RNA, 22 nt, Artificial Sequence
  SARM1 targeting guide sequence portion
cgccgacuuagugccauuggua

SEQ ID NO: 7755 - RNA, 22 nt, Artificial Sequence
  SARM1 targeting guide sequence portion
cgccugcugggcgaggaggugc

SEQ ID NO: 7756 - RNA, 22 nt, Artificial Sequence
  SARM1 targeting guide sequence portion
cgccugguuuccuacucuacca

SEQ ID NO: 7757 - RNA, 22 nt, Artificial Sequence
  SARM1 targeting guide sequence portion
cgcgcgcugcgccugcugggcg

SEQ ID NO: 7758 - RNA, 22 nt, Artificial Sequence
  SARM1 targeting guide sequence portion
cgcgcgcuuggccagcgccgac

SEQ ID NO: 7759 - RNA, 22 nt, Artificial Sequence
  SARM1 targeting guide sequence portion
cgcgcugcgccugcugggcgag

SEQ ID NO: 7760 - RNA, 22 nt, Artificial Sequence
  SARM1 targeting guide sequence portion
cgcgcuuggccagcgccgacuu

SEQ ID NO: 7761 - RNA, 22 nt, Artificial Sequence
  SARM1 targeting guide sequence portion
cgcugcgccugcugggcgagga

SEQ ID NO: 7762 - RNA, 22 nt, Artificial Sequence
  SARM1 targeting guide sequence portion
cgcuggccaagcgcgcgcugcg

SEQ ID NO: 7763 - RNA, 22 nt, Artificial Sequence
  SARM1 targeting guide sequence portion
cgcuuggccagcgccgacuuag

SEQ ID NO: 7764 - RNA, 22 nt, Artificial Sequence
  SARM1 targeting guide sequence portion
cggaagcucucgcaguacuugg

SEQ ID NO: 7765 - RNA, 22 nt, Artificial Sequence
  SARM1 targeting guide sequence portion
cggagggcaggaugggccgugg

SEQ ID NO: 7766 - RNA, 22 nt, Artificial Sequence
  SARM1 targeting guide sequence portion
cggcccauccugcccuccgugc

SEQ ID NO: 7767 - RNA, 22 nt, Artificial Sequence
  SARM1 targeting guide sequence portion
cggccuccuuccagcugggcac

SEQ ID NO: 7768 - RNA, 22 nt, Artificial Sequence
  SARM1 targeting guide sequence portion
cggcgccauccagagccugaaa

SEQ ID NO: 7769 - RNA, 22 nt, Artificial Sequence
  SARM1 targeting guide sequence portion
cggcgcuggccaagcgcgcgcu

SEQ ID NO: 7770 - RNA, 22 nt, Artificial Sequence
  SARM1 targeting guide sequence portion
cgguuucuccaaguacugcgag

SEQ ID NO: 7771 - RNA, 22 nt, Artificial Sequence
  SARM1 targeting guide sequence portion
cgucugaaccucggccuccuuc

SEQ ID NO: 7772 - RNA, 22 nt, Artificial Sequence
  SARM1 targeting guide sequence portion
cgugcccagcuggaaggaggcc

SEQ ID NO: 7773 - RNA, 22 nt, Artificial Sequence
  SARM1 targeting guide sequence portion
cguggcaccuccucgcccagca

SEQ ID NO: 7774 - RNA, 22 nt, Artificial Sequence
  SARM1 targeting guide sequence portion
cguggcugcagcagaucgguuu

SEQ ID NO: 7775 - RNA, 22 nt, Artificial Sequence
  SARM1 targeting guide sequence portion
cguuucaggcucuggauggcgc

SEQ ID NO: 7776 - RNA, 22 nt, Artificial Sequence
  SARM1 targeting guide sequence portion
cuaagucggcgcuggccaagcg

SEQ ID NO: 7777 - RNA, 22 nt, Artificial Sequence
  SARM1 targeting guide sequence portion
cuaccaauggcacuaagucggc

SEQ ID NO: 7778 - RNA, 22 nt, Artificial Sequence
  SARM1 targeting guide sequence portion
cuacccggaagcucucgcagua

SEQ ID NO: 7779 - RNA, 22 nt, Artificial Sequence
  SARM1 targeting guide sequence portion
cuacucuaccaauggcacuaag

SEQ ID NO: 7780 - RNA, 22 nt, Artificial Sequence
  SARM1 targeting guide sequence portion
cuagguguucagcgacaucggc

SEQ ID NO: 7781 - RNA, 22 nt, Artificial Sequence
  SARM1 targeting guide sequence portion
cuccaaguacugcgagagcuuc

SEQ ID NO: 7782 - RNA, 22 nt, Artificial Sequence
  SARM1 targeting guide sequence portion
cuccgugcccagcuggaaggag

SEQ ID NO: 7783 - RNA, 22 nt, Artificial Sequence
  SARM1 targeting guide sequence portion
cuccucgcccagcaggcgcagc

SEQ ID NO: 7784 - RNA, 22 nt, Artificial Sequence
  SARM1 targeting guide sequence portion
cuccuuccagcugggcacggag

SEQ ID NO: 7785 - RNA, 22 nt, Artificial Sequence
  SARM1 targeting guide sequence portion
cucgcaguacuuggagaaaccg

SEQ ID NO: 7786 - RNA, 22 nt, Artificial Sequence
  SARM1 targeting guide sequence portion
cucgcccagcaggcgcagcgcg

SEQ ID NO: 7787 - RNA, 22 nt, Artificial Sequence
  SARM1 targeting guide sequence portion
cucggccuccuuccagcugggc

SEQ ID NO: 7788 - RNA, 22 nt, Artificial Sequence
  SARM1 targeting guide sequence portion
cucuaccaauggcacuaagucg

SEQ ID NO: 7789 - RNA, 22 nt, Artificial Sequence
  SARM1 targeting guide sequence portion
cucuacccggaagcucucgcag

SEQ ID NO: 7790 - RNA, 22 nt, Artificial Sequence
  SARM1 targeting guide sequence portion
cucucgcaguacuuggagaaac

SEQ ID NO: 7791 - RNA, 22 nt, Artificial Sequence
  SARM1 targeting guide sequence portion
cucuggauggcgccgaugucgc

SEQ ID NO: 7792 - RNA, 22 nt, Artificial Sequence
  SARM1 targeting guide sequence portion
cugaaacgccugguuuccuacu

SEQ ID NO: 7793 - RNA, 22 nt, Artificial Sequence
  SARM1 targeting guide sequence portion
cugaaccucggccuccuuccag

SEQ ID NO: 7794 - RNA, 22 nt, Artificial Sequence
  SARM1 targeting guide sequence portion
cugcagcagaucgguuucucca

SEQ ID NO: 7795 - RNA, 22 nt, Artificial Sequence
  SARM1 targeting guide sequence portion
cugcagccacgucugaaccucg

SEQ ID NO: 7796 - RNA, 22 nt, Artificial Sequence
  SARM1 targeting guide sequence portion
cugcccuccgugcccagcugga

SEQ ID NO: 7797 - RNA, 22 nt, Artificial Sequence
  SARM1 targeting guide sequence portion
cugcgccugcugggcgaggagg

SEQ ID NO: 7798 - RNA, 22 nt, Artificial Sequence
  SARM1 targeting guide sequence portion
cugcugcagccacgucugaacc

SEQ ID NO: 7799 - RNA, 22 nt, Artificial Sequence
  SARM1 targeting guide sequence portion
cugcugggcgaggaggugccac

SEQ ID NO: 7800 - RNA, 22 nt, Artificial Sequence
  SARM1 targeting guide sequence portion
cuggaaggaggccgagguucag

SEQ ID NO: 7801 - RNA, 22 nt, Artificial Sequence
  SARM1 targeting guide sequence portion
cuggauggcgccgaugucgcug

SEQ ID NO: 7802 - RNA, 22 nt, Artificial Sequence
  SARM1 targeting guide sequence portion
cuggccaagcgcgcgcugcgcc

SEQ ID NO: 7803 - RNA, 22 nt, Artificial Sequence
  SARM1 targeting guide sequence portion
cugggcacggagggcaggaugg

SEQ ID NO: 7804 - RNA, 22 nt, Artificial Sequence
  SARM1 targeting guide sequence portion
cugggcgaggaggugccacggc

SEQ ID NO: 7805 - RNA, 22 nt, Artificial Sequence
  SARM1 targeting guide sequence portion
cugguuuccuacucuaccaaug

SEQ ID NO: 7806 - RNA, 22 nt, Artificial Sequence
  SARM1 targeting guide sequence portion
cuuagugccauugguagaguag

SEQ ID NO: 7807 - RNA, 22 nt, Artificial Sequence
  SARM1 targeting guide sequence portion
cuuccagcugggcacggagggc

SEQ ID NO: 7808 - RNA, 22 nt, Artificial Sequence
  SARM1 targeting guide sequence portion
cuuggagaaaccgaucugcugc

SEQ ID NO: 7809 - RNA, 22 nt, Artificial Sequence
  SARM1 targeting guide sequence portion
cuuggccagcgccgacuuagug

SEQ ID NO: 7810 - RNA, 22 nt, Artificial Sequence
  SARM1 targeting guide sequence portion
gaaaccaggcguuucaggcucu

SEQ ID NO: 7811 - RNA, 22 nt, Artificial Sequence
  SARM1 targeting guide sequence portion
gaaaccgaucugcugcagccac

SEQ ID NO: 7812 - RNA, 22 nt, Artificial Sequence
  SARM1 targeting guide sequence portion
gaaacgccugguuuccuacucu

SEQ ID NO: 7813 - RNA, 22 nt, Artificial Sequence
  SARM1 targeting guide sequence portion
gaaccucggccuccuuccagcu

SEQ ID NO: 7814 - RNA, 22 nt, Artificial Sequence
  SARM1 targeting guide sequence portion
gaagcucucgcaguacuuggag

SEQ ID NO: 7815 - RNA, 22 nt, Artificial Sequence
  SARM1 targeting guide sequence portion
gaaggaggccgagguucagacg

SEQ ID NO: 7816 - RNA, 22 nt, Artificial Sequence
  SARM1 targeting guide sequence portion
gacaucggcgccauccagagcc

SEQ ID NO: 7817 - RNA, 22 nt, Artificial Sequence
  SARM1 targeting guide sequence portion
gacguggcugcagcagaucggu

SEQ ID NO: 7818 - RNA, 22 nt, Artificial Sequence
  SARM1 targeting guide sequence portion
gacuuagugccauugguagagu

SEQ ID NO: 7819 - RNA, 22 nt, Artificial Sequence
  SARM1 targeting guide sequence portion
gagaaaccgaucugcugcagcc

SEQ ID NO: 7820 - RNA, 22 nt, Artificial Sequence
  SARM1 targeting guide sequence portion
gagccugaaacgccugguuucc

SEQ ID NO: 7821 - RNA, 22 nt, Artificial Sequence
  SARM1 targeting guide sequence portion
gaggaggugccacggcccaucc

SEQ ID NO: 7822 - RNA, 22 nt, Artificial Sequence
  SARM1 targeting guide sequence portion
gaggccgagguucagacguggc

SEQ ID NO: 7823 - RNA, 22 nt, Artificial Sequence
  SARM1 targeting guide sequence portion
gagggcaggaugggccguggca

SEQ ID NO: 7824 - RNA, 22 nt, Artificial Sequence
  SARM1 targeting guide sequence portion
gaggugccacggcccauccugc

SEQ ID NO: 7825 - RNA, 22 nt, Artificial Sequence
  SARM1 targeting guide sequence portion
gagguucagacguggcugcagc

SEQ ID NO: 7826 - RNA, 22 nt, Artificial Sequence
  SARM1 targeting guide sequence portion
gaguaggaaaccaggcguuuca

SEQ ID NO: 7827 - RNA, 22 nt, Artificial Sequence
  SARM1 targeting guide sequence portion
gaucgguuucuccaaguacugc

SEQ ID NO: 7828 - RNA, 22 nt, Artificial Sequence
  SARM1 targeting guide sequence portion
gaucugcugcagccacgucuga

SEQ ID NO: 7829 - RNA, 22 nt, Artificial Sequence
  SARM1 targeting guide sequence portion
gauggcgccgaugucgcugaac

SEQ ID NO: 7830 - RNA, 22 nt, Artificial Sequence
  SARM1 targeting guide sequence portion
gaugggccguggcaccuccucg

SEQ ID NO: 7831 - RNA, 22 nt, Artificial Sequence
  SARM1 targeting guide sequence portion
gcaccuccucgcccagcaggcg

SEQ ID NO: 7832 - RNA, 22 nt, Artificial Sequence
  SARM1 targeting guide sequence portion
gcacggagggcaggaugggccg

SEQ ID NO: 7833 - RNA, 22 nt, Artificial Sequence
  SARM1 targeting guide sequence portion
gcacuaagucggcgcuggccaa

SEQ ID NO: 7834 - RNA, 22 nt, Artificial Sequence
  SARM1 targeting guide sequence portion
gcagaucgguuucuccaaguac

SEQ ID NO: 7835 - RNA, 22 nt, Artificial Sequence
  SARM1 targeting guide sequence portion
gcagcagaucgguuucuccaag

SEQ ID NO: 7836 - RNA, 22 nt, Artificial Sequence
  SARM1 targeting guide sequence portion
gcagccacgucugaaccucggc

SEQ ID NO: 7837 - RNA, 22 nt, Artificial Sequence
  SARM1 targeting guide sequence portion
gcagcgcgcgcuuggccagcgc

SEQ ID NO: 7838 - RNA, 22 nt, Artificial Sequence
  SARM1 targeting guide sequence portion
gcaggaugggccguggcaccuc

SEQ ID NO: 7839 - RNA, 22 nt, Artificial Sequence
  SARM1 targeting guide sequence portion
gcaggcgcagcgcgcgcuuggc

SEQ ID NO: 7840 - RNA, 22 nt, Artificial Sequence
  SARM1 targeting guide sequence portion
gcaguacuuggagaaaccgauc

SEQ ID NO: 7841 - RNA, 22 nt, Artificial Sequence
  SARM1 targeting guide sequence portion
gccaagcgcgcgcugcgccugc

SEQ ID NO: 7842 - RNA, 22 nt, Artificial Sequence
  SARM1 targeting guide sequence portion
gccacggcccauccugcccucc

SEQ ID NO: 7843 - RNA, 22 nt, Artificial Sequence
  SARM1 targeting guide sequence portion
gccacgucugaaccucggccuc

SEQ ID NO: 7844 - RNA, 22 nt, Artificial Sequence
  SARM1 targeting guide sequence portion
gccagcgccgacuuagugccau

SEQ ID NO: 7845 - RNA, 22 nt, Artificial Sequence
  SARM1 targeting guide sequence portion
gccauccagagccugaaacgcc

SEQ ID NO: 7846 - RNA, 22 nt, Artificial Sequence
  SARM1 targeting guide sequence portion
gccauugguagaguaggaaacc

SEQ ID NO: 7847 - RNA, 22 nt, Artificial Sequence
  SARM1 targeting guide sequence portion
gcccagcaggcgcagcgcgcgc

SEQ ID NO: 7848 - RNA, 22 nt, Artificial Sequence
  SARM1 targeting guide sequence portion
gcccagcuggaaggaggccgag

SEQ ID NO: 7849 - RNA, 22 nt, Artificial Sequence
  SARM1 targeting guide sequence portion
gcccauccugcccuccgugccc

SEQ ID NO: 7850 - RNA, 22 nt, Artificial Sequence
  SARM1 targeting guide sequence portion
gcccuccgugcccagcuggaag

SEQ ID NO: 7851 - RNA, 22 nt, Artificial Sequence
  SARM1 targeting guide sequence portion
gccgacuuagugccauugguag

SEQ ID NO: 7852 - RNA, 22 nt, Artificial Sequence
  SARM1 targeting guide sequence portion
gccgagguucagacguggcugc

SEQ ID NO: 7853 - RNA, 22 nt, Artificial Sequence
  SARM1 targeting guide sequence portion
gccguggcaccuccucgcccag

SEQ ID NO: 7854 - RNA, 22 nt, Artificial Sequence
  SARM1 targeting guide sequence portion
gccuccuuccagcugggcacgg

SEQ ID NO: 7855 - RNA, 22 nt, Artificial Sequence
  SARM1 targeting guide sequence portion
gccugaaacgccugguuuccua

SEQ ID NO: 7856 - RNA, 22 nt, Artificial Sequence
  SARM1 targeting guide sequence portion
gccugcugggcgaggaggugcc

SEQ ID NO: 7857 - RNA, 22 nt, Artificial Sequence
  SARM1 targeting guide sequence portion
gccugguuuccuacucuaccaa

SEQ ID NO: 7858 - RNA, 22 nt, Artificial Sequence
  SARM1 targeting guide sequence portion
gcgacaucggcgccauccagag

SEQ ID NO: 7859 - RNA, 22 nt, Artificial Sequence
  SARM1 targeting guide sequence portion
gcgaggaggugccacggcccau

SEQ ID NO: 7860 - RNA, 22 nt, Artificial Sequence
  SARM1 targeting guide sequence portion
gcgcagcgcgcgcuuggccagc

SEQ ID NO: 7861 - RNA, 22 nt, Artificial Sequence
  SARM1 targeting guide sequence portion
gcgccauccagagccugaaacg

SEQ ID NO: 7862 - RNA, 22 nt, Artificial Sequence
  SARM1 targeting guide sequence portion
gcgccgacuuagugccauuggu

SEQ ID NO: 7863 - RNA, 22 nt, Artificial Sequence
  SARM1 targeting guide sequence portion
gcgccugcugggcgaggaggug

SEQ ID NO: 7864 - RNA, 22 nt, Artificial Sequence
  SARM1 targeting guide sequence portion
gcgcgcgcugcgccugcugggc

SEQ ID NO: 7865 - RNA, 22 nt, Artificial Sequence
  SARM1 targeting guide sequence portion
gcgcgcgcuuggccagcgccga

SEQ ID NO: 7866 - RNA, 22 nt, Artificial Sequence
  SARM1 targeting guide sequence portion
gcgcgcugcgccugcugggcga

SEQ ID NO: 7867 - RNA, 22 nt, Artificial Sequence
  SARM1 targeting guide sequence portion
gcgcgcuuggccagcgccgacu

SEQ ID NO: 7868 - RNA, 22 nt, Artificial Sequence
  SARM1 targeting guide sequence portion
gcgcugcgccugcugggcgagg

SEQ ID NO: 7869 - RNA, 22 nt, Artificial Sequence
  SARM1 targeting guide sequence portion
gcgcuggccaagcgcgcgcugc

SEQ ID NO: 7870 - RNA, 22 nt, Artificial Sequence
  SARM1 targeting guide sequence portion
gcgcuuggccagcgccgacuua

SEQ ID NO: 7871 - RNA, 22 nt, Artificial Sequence
  SARM1 targeting guide sequence portion
gcguuucaggcucuggauggcg

SEQ ID NO: 7872 - RNA, 22 nt, Artificial Sequence
  SARM1 targeting guide sequence portion
gcucucgcaguacuuggagaaa

SEQ ID NO: 7873 - RNA, 22 nt, Artificial Sequence
  SARM1 targeting guide sequence portion
gcucuggauggcgccgaugucg

SEQ ID NO: 7874 - RNA, 22 nt, Artificial Sequence
  SARM1 targeting guide sequence portion
gcugcagcagaucgguuucucc

SEQ ID NO: 7875 - RNA, 22 nt, Artificial Sequence
  SARM1 targeting guide sequence portion
gcugcagccacgucugaaccuc

SEQ ID NO: 7876 - RNA, 22 nt, Artificial Sequence
  SARM1 targeting guide sequence portion
gcugcgccugcugggcgaggag

SEQ ID NO: 7877 - RNA, 22 nt, Artificial Sequence
  SARM1 targeting guide sequence portion
gcuggaaggaggccgagguuca

SEQ ID NO: 7878 - RNA, 22 nt, Artificial Sequence
  SARM1 targeting guide sequence portion
gcuggccaagcgcgcgcugcgc

SEQ ID NO: 7879 - RNA, 22 nt, Artificial Sequence
  SARM1 targeting guide sequence portion
gcugggcacggagggcaggaug

SEQ ID NO: 7880 - RNA, 22 nt, Artificial Sequence
  SARM1 targeting guide sequence portion
gcugggcgaggaggugccacgg

SEQ ID NO: 7881 - RNA, 22 nt, Artificial Sequence
  SARM1 targeting guide sequence portion
gcuuggccagcgccgacuuagu

SEQ ID NO: 7882 - RNA, 22 nt, Artificial Sequence
  SARM1 targeting guide sequence portion
ggaaaccaggcguuucaggcuc

SEQ ID NO: 7883 - RNA, 22 nt, Artificial Sequence
  SARM1 targeting guide sequence portion
ggaagcucucgcaguacuugga

SEQ ID NO: 7884 - RNA, 22 nt, Artificial Sequence
  SARM1 targeting guide sequence portion
ggaaggaggccgagguucagac

SEQ ID NO: 7885 - RNA, 22 nt, Artificial Sequence
  SARM1 targeting guide sequence portion
ggagaaaccgaucugcugcagc

SEQ ID NO: 7886 - RNA, 22 nt, Artificial Sequence
  SARM1 targeting guide sequence portion
ggaggccgagguucagacgugg

SEQ ID NO: 7887 - RNA, 22 nt, Artificial Sequence
  SARM1 targeting guide sequence portion
ggagggcaggaugggccguggc

SEQ ID NO: 7888 - RNA, 22 nt, Artificial Sequence
  SARM1 targeting guide sequence portion
ggaggugccacggcccauccug

SEQ ID NO: 7889 - RNA, 22 nt, Artificial Sequence
  SARM1 targeting guide sequence portion
ggauggcgccgaugucgcugaa

SEQ ID NO: 7890 - RNA, 22 nt, Artificial Sequence
  SARM1 targeting guide sequence portion
ggaugggccguggcaccuccuc

SEQ ID NO: 7891 - RNA, 22 nt, Artificial Sequence
  SARM1 targeting guide sequence portion
ggcaccuccucgcccagcaggc

SEQ ID NO: 7892 - RNA, 22 nt, Artificial Sequence
  SARM1 targeting guide sequence portion
ggcacggagggcaggaugggcc

SEQ ID NO: 7893 - RNA, 22 nt, Artificial Sequence
  SARM1 targeting guide sequence portion
ggcacuaagucggcgcuggcca

SEQ ID NO: 7894 - RNA, 22 nt, Artificial Sequence
  SARM1 targeting guide sequence portion
ggcaggaugggccguggcaccu

SEQ ID NO: 7895 - RNA, 22 nt, Artificial Sequence
  SARM1 targeting guide sequence portion
ggccaagcgcgcgcugcgccug

SEQ ID NO: 7896 - RNA, 22 nt, Artificial Sequence
  SARM1 targeting guide sequence portion
ggccagcgccgacuuagugcca

SEQ ID NO: 7897 - RNA, 22 nt, Artificial Sequence
  SARM1 targeting guide sequence portion
ggcccauccugcccuccgugcc

SEQ ID NO: 7898 - RNA, 22 nt, Artificial Sequence
  SARM1 targeting guide sequence portion
ggccgagguucagacguggcug

SEQ ID NO: 7899 - RNA, 22 nt, Artificial Sequence
  SARM1 targeting guide sequence portion
ggccguggcaccuccucgccca

SEQ ID NO: 7900 - RNA, 22 nt, Artificial Sequence
  SARM1 targeting guide sequence portion
ggccuccuuccagcugggcacg

SEQ ID NO: 7901 - RNA, 22 nt, Artificial Sequence
  SARM1 targeting guide sequence portion
ggcgaggaggugccacggccca

SEQ ID NO: 7902 - RNA, 22 nt, Artificial Sequence
  SARM1 targeting guide sequence portion
ggcgcagcgcgcgcuuggccag

SEQ ID NO: 7903 - RNA, 22 nt, Artificial Sequence
  SARM1 targeting guide sequence portion
ggcgccauccagagccugaaac

SEQ ID NO: 7904 - RNA, 22 nt, Artificial Sequence
  SARM1 targeting guide sequence portion
ggcgccgaugucgcugaacacc

SEQ ID NO: 7905 - RNA, 22 nt, Artificial Sequence
  SARM1 targeting guide sequence portion
ggcgcuggccaagcgcgcgcug

SEQ ID NO: 7906 - RNA, 22 nt, Artificial Sequence
  SARM1 targeting guide sequence portion
ggcguuucaggcucuggauggc

SEQ ID NO: 7907 - RNA, 22 nt, Artificial Sequence
  SARM1 targeting guide sequence portion
ggcucuggauggcgccgauguc

SEQ ID NO: 7908 - RNA, 22 nt, Artificial Sequence
  SARM1 targeting guide sequence portion
ggcugcagcagaucgguuucuc

SEQ ID NO: 7909 - RNA, 22 nt, Artificial Sequence
  SARM1 targeting guide sequence portion
gggcacggagggcaggaugggc

SEQ ID NO: 7910 - RNA, 22 nt, Artificial Sequence
  SARM1 targeting guide sequence portion
gggcaggaugggccguggcacc

SEQ ID NO: 7911 - RNA, 22 nt, Artificial Sequence
  SARM1 targeting guide sequence portion
gggccguggcaccuccucgccc

SEQ ID NO: 7912 - RNA, 22 nt, Artificial Sequence
  SARM1 targeting guide sequence portion
gggcgaggaggugccacggccc

SEQ ID NO: 7913 - RNA, 22 nt, Artificial Sequence
  SARM1 targeting guide sequence portion
gguagaguaggaaaccaggcgu

SEQ ID NO: 7914 - RNA, 22 nt, Artificial Sequence
  SARM1 targeting guide sequence portion
ggugccacggcccauccugccc

SEQ ID NO: 7915 - RNA, 22 nt, Artificial Sequence
  SARM1 targeting guide sequence portion
gguguucagcgacaucggcgcc

SEQ ID NO: 7916 - RNA, 22 nt, Artificial Sequence
  SARM1 targeting guide sequence portion
gguucagacguggcugcagcag

SEQ ID NO: 7917 - RNA, 22 nt, Artificial Sequence
  SARM1 targeting guide sequence portion
gguuuccuacucuaccaauggc

SEQ ID NO: 7918 - RNA, 22 nt, Artificial Sequence
  SARM1 targeting guide sequence portion
gguuucuccaaguacugcgaga

SEQ ID NO: 7919 - RNA, 22 nt, Artificial Sequence
  SARM1 targeting guide sequence portion
guacuuggagaaaccgaucugc

SEQ ID NO: 7920 - RNA, 22 nt, Artificial Sequence
  SARM1 targeting guide sequence portion
guagaguaggaaaccaggcguu

SEQ ID NO: 7921 - RNA, 22 nt, Artificial Sequence
  SARM1 targeting guide sequence portion
guaggaaaccaggcguuucagg

SEQ ID NO: 7922 - RNA, 22 nt, Artificial Sequence
  SARM1 targeting guide sequence portion
gucggcgcuggccaagcgcgcg

SEQ ID NO: 7923 - RNA, 22 nt, Artificial Sequence
  SARM1 targeting guide sequence portion
gucugaaccucggccuccuucc

SEQ ID NO: 7924 - RNA, 22 nt, Artificial Sequence
  SARM1 targeting guide sequence portion
gugccacggcccauccugcccu

SEQ ID NO: 7925 - RNA, 22 nt, Artificial Sequence
  SARM1 targeting guide sequence portion
gugccauugguagaguaggaaa

SEQ ID NO: 7926 - RNA, 22 nt, Artificial Sequence
  SARM1 targeting guide sequence portion
gugcccagcuggaaggaggccg

SEQ ID NO: 7927 - RNA, 22 nt, Artificial Sequence
  SARM1 targeting guide sequence portion
guggcaccuccucgcccagcag

SEQ ID NO: 7928 - RNA, 22 nt, Artificial Sequence
  SARM1 targeting guide sequence portion
guggcugcagcagaucgguuuc

SEQ ID NO: 7929 - RNA, 22 nt, Artificial Sequence
  SARM1 targeting guide sequence portion
guguucagcgacaucggcgcca

SEQ ID NO: 7930 - RNA, 22 nt, Artificial Sequence
  SARM1 targeting guide sequence portion
guucagacguggcugcagcaga

SEQ ID NO: 7931 - RNA, 22 nt, Artificial Sequence
  SARM1 targeting guide sequence portion
guucagcgacaucggcgccauc

SEQ ID NO: 7932 - RNA, 22 nt, Artificial Sequence
  SARM1 targeting guide sequence portion
guuucaggcucuggauggcgcc

SEQ ID NO: 7933 - RNA, 22 nt, Artificial Sequence
  SARM1 targeting guide sequence portion
guuuccuacucuaccaauggca

SEQ ID NO: 7934 - RNA, 22 nt, Artificial Sequence
  SARM1 targeting guide sequence portion
guuucuccaaguacugcgagag

SEQ ID NO: 7935 - RNA, 22 nt, Artificial Sequence
  SARM1 targeting guide sequence portion
uaagucggcgcuggccaagcgc

SEQ ID NO: 7936 - RNA, 22 nt, Artificial Sequence
  SARM1 targeting guide sequence portion
uaccaauggcacuaagucggcg

SEQ ID NO: 7937 - RNA, 22 nt, Artificial Sequence
  SARM1 targeting guide sequence portion
uacccggaagcucucgcaguac

SEQ ID NO: 7938 - RNA, 22 nt, Artificial Sequence
  SARM1 targeting guide sequence portion
uacucuaccaauggcacuaagu

SEQ ID NO: 7939 - RNA, 22 nt, Artificial Sequence
  SARM1 targeting guide sequence portion
uacuuggagaaaccgaucugcu

SEQ ID NO: 7940 - RNA, 22 nt, Artificial Sequence
  SARM1 targeting guide sequence portion
uagaguaggaaaccaggcguuu

SEQ ID NO: 7941 - RNA, 22 nt, Artificial Sequence
  SARM1 targeting guide sequence portion
uaggaaaccaggcguuucaggc

SEQ ID NO: 7942 - RNA, 22 nt, Artificial Sequence
  SARM1 targeting guide sequence portion
uagguguucagcgacaucggcg

SEQ ID NO: 7943 - RNA, 22 nt, Artificial Sequence
  SARM1 targeting guide sequence portion
uagugccauugguagaguagga

SEQ ID NO: 7944 - RNA, 22 nt, Artificial Sequence
  SARM1 targeting guide sequence portion
ucagacguggcugcagcagauc

SEQ ID NO: 7945 - RNA, 22 nt, Artificial Sequence
  SARM1 targeting guide sequence portion
ucagcgacaucggcgccaucca

SEQ ID NO: 7946 - RNA, 22 nt, Artificial Sequence
  SARM1 targeting guide sequence portion
ucaggcucuggauggcgccgau

SEQ ID NO: 7947 - RNA, 22 nt, Artificial Sequence
  SARM1 targeting guide sequence portion
uccaaguacugcgagagcuucc

SEQ ID NO: 7948 - RNA, 22 nt, Artificial Sequence
  SARM1 targeting guide sequence portion
uccagagccugaaacgccuggu

SEQ ID NO: 7949 - RNA, 22 nt, Artificial Sequence
  SARM1 targeting guide sequence portion
uccagcugggcacggagggcag

SEQ ID NO: 7950 - RNA, 22 nt, Artificial Sequence
  SARM1 targeting guide sequence portion
ucccuagguguucagcgacauc

SEQ ID NO: 7951 - RNA, 22 nt, Artificial Sequence
  SARM1 targeting guide sequence portion
uccgugcccagcuggaaggagg

SEQ ID NO: 7952 - RNA, 22 nt, Artificial Sequence
  SARM1 targeting guide sequence portion
uccuacucuaccaauggcacua

SEQ ID NO: 7953 - RNA, 22 nt, Artificial Sequence
  SARM1 targeting guide sequence portion
uccucgcccagcaggcgcagcg

SEQ ID NO: 7954 - RNA, 22 nt, Artificial Sequence
  SARM1 targeting guide sequence portion
uccugcccuccgugcccagcug

SEQ ID NO: 7955 - RNA, 22 nt, Artificial Sequence
  SARM1 targeting guide sequence portion
uccuuccagcugggcacggagg

SEQ ID NO: 7956 - RNA, 22 nt, Artificial Sequence
  SARM1 targeting guide sequence portion
ucgcaguacuuggagaaaccga

SEQ ID NO: 7957 - RNA, 22 nt, Artificial Sequence
  SARM1 targeting guide sequence portion
ucgcccagcaggcgcagcgcgc

SEQ ID NO: 7958 - RNA, 22 nt, Artificial Sequence
  SARM1 targeting guide sequence portion
ucggccuccuuccagcugggca

SEQ ID NO: 7959 - RNA, 22 nt, Artificial Sequence
  SARM1 targeting guide sequence portion
ucggcgccauccagagccugaa

SEQ ID NO: 7960 - RNA, 22 nt, Artificial Sequence
  SARM1 targeting guide sequence portion
ucggcgcuggccaagcgcgcgc

SEQ ID NO: 7961 - RNA, 22 nt, Artificial Sequence
  SARM1 targeting guide sequence portion
ucgguuucuccaaguacugcga

SEQ ID NO: 7962 - RNA, 22 nt, Artificial Sequence
  SARM1 targeting guide sequence portion
ucuaccaauggcacuaagucgg

SEQ ID NO: 7963 - RNA, 22 nt, Artificial Sequence
  SARM1 targeting guide sequence portion
ucuacccggaagcucucgcagu

SEQ ID NO: 7964 - RNA, 22 nt, Artificial Sequence
  SARM1 targeting guide sequence portion
ucuccaaguacugcgagagcuu

SEQ ID NO: 7965 - RNA, 22 nt, Artificial Sequence
  SARM1 targeting guide sequence portion
ucucgcaguacuuggagaaacc

SEQ ID NO: 7966 - RNA, 22 nt, Artificial Sequence
  SARM1 targeting guide sequence portion
ucugaaccucggccuccuucca

SEQ ID NO: 7967 - RNA, 22 nt, Artificial Sequence
  SARM1 targeting guide sequence portion
ucugcugcagccacgucugaac

SEQ ID NO: 7968 - RNA, 22 nt, Artificial Sequence
  SARM1 targeting guide sequence portion
ucuggauggcgccgaugucgcu

SEQ ID NO: 7969 - RNA, 22 nt, Artificial Sequence
  SARM1 targeting guide sequence portion
ugaaacgccugguuuccuacuc

SEQ ID NO: 7970 - RNA, 22 nt, Artificial Sequence
  SARM1 targeting guide sequence portion
ugaaccucggccuccuuccagc

SEQ ID NO: 7971 - RNA, 22 nt, Artificial Sequence
  SARM1 targeting guide sequence portion
ugcagcagaucgguuucuccaa

SEQ ID NO: 7972 - RNA, 22 nt, Artificial Sequence
  SARM1 targeting guide sequence portion
ugcagccacgucugaaccucgg

SEQ ID NO: 7973 - RNA, 22 nt, Artificial Sequence
  SARM1 targeting guide sequence portion
ugccacggcccauccugcccuc

SEQ ID NO: 7974 - RNA, 22 nt, Artificial Sequence
  SARM1 targeting guide sequence portion
ugccauugguagaguaggaaac

SEQ ID NO: 7975 - RNA, 22 nt, Artificial Sequence
  SARM1 targeting guide sequence portion
ugcccagcuggaaggaggccga

SEQ ID NO: 7976 - RNA, 22 nt, Artificial Sequence
  SARM1 targeting guide sequence portion
ugcccuccgugcccagcuggaa

SEQ ID NO: 7977 - RNA, 22 nt, Artificial Sequence
  SARM1 targeting guide sequence portion
ugcgccugcugggcgaggaggu

SEQ ID NO: 7978 - RNA, 22 nt, Artificial Sequence
  SARM1 targeting guide sequence portion
ugcugcagccacgucugaaccu

SEQ ID NO: 7979 - RNA, 22 nt, Artificial Sequence
  SARM1 targeting guide sequence portion
ugcugggcgaggaggugccacg

SEQ ID NO: 7980 - RNA, 22 nt, Artificial Sequence
  SARM1 targeting guide sequence portion
uggaaggaggccgagguucaga

SEQ ID NO: 7981 - RNA, 22 nt, Artificial Sequence
  SARM1 targeting guide sequence portion
uggagaaaccgaucugcugcag

SEQ ID NO: 7982 - RNA, 22 nt, Artificial Sequence
  SARM1 targeting guide sequence portion
uggauggcgccgaugucgcuga

SEQ ID NO: 7983 - RNA, 22 nt, Artificial Sequence
  SARM1 targeting guide sequence portion
uggcaccuccucgcccagcagg

SEQ ID NO: 7984 - RNA, 22 nt, Artificial Sequence
  SARM1 targeting guide sequence portion
uggcacuaagucggcgcuggcc

SEQ ID NO: 7985 - RNA, 22 nt, Artificial Sequence
  SARM1 targeting guide sequence portion
uggccaagcgcgcgcugcgccu

SEQ ID NO: 7986 - RNA, 22 nt, Artificial Sequence
  SARM1 targeting guide sequence portion
uggccagcgccgacuuagugcc

SEQ ID NO: 7987 - RNA, 22 nt, Artificial Sequence
  SARM1 targeting guide sequence portion
uggcgccgaugucgcugaacac

SEQ ID NO: 7988 - RNA, 22 nt, Artificial Sequence
  SARM1 targeting guide sequence portion
uggcugcagcagaucgguuucu

SEQ ID NO: 7989 - RNA, 22 nt, Artificial Sequence
  SARM1 targeting guide sequence portion
ugggcacggagggcaggauggg

SEQ ID NO: 7990 - RNA, 22 nt, Artificial Sequence
  SARM1 targeting guide sequence portion
ugggccguggcaccuccucgcc

SEQ ID NO: 7991 - RNA, 22 nt, Artificial Sequence
  SARM1 targeting guide sequence portion
ugggcgaggaggugccacggcc

SEQ ID NO: 7992 - RNA, 22 nt, Artificial Sequence
  SARM1 targeting guide sequence portion
ugguagaguaggaaaccaggcg

SEQ ID NO: 7993 - RNA, 22 nt, Artificial Sequence
  SARM1 targeting guide sequence portion
ugguuuccuacucuaccaaugg

SEQ ID NO: 7994 - RNA, 22 nt, Artificial Sequence
  SARM1 targeting guide sequence portion
uguucagcgacaucggcgccau

SEQ ID NO: 7995 - RNA, 22 nt, Artificial Sequence
  SARM1 targeting guide sequence portion
uuagugccauugguagaguagg

SEQ ID NO: 7996 - RNA, 22 nt, Artificial Sequence
  SARM1 targeting guide sequence portion
uucagacguggcugcagcagau

SEQ ID NO: 7997 - RNA, 22 nt, Artificial Sequence
  SARM1 targeting guide sequence portion
uucagcgacaucggcgccaucc

SEQ ID NO: 7998 - RNA, 22 nt, Artificial Sequence
  SARM1 targeting guide sequence portion
uucaggcucuggauggcgccga

SEQ ID NO: 7999 - RNA, 22 nt, Artificial Sequence
  SARM1 targeting guide sequence portion
uuccagcugggcacggagggca

SEQ ID NO: 8000 - RNA, 22 nt, Artificial Sequence
  SARM1 targeting guide sequence portion
uuccuacucuaccaauggcacu

SEQ ID NO: 8001 - RNA, 22 nt, Artificial Sequence
  SARM1 targeting guide sequence portion
uucuccaaguacugcgagagcu

SEQ ID NO: 8002 - RNA, 22 nt, Artificial Sequence
  SARM1 targeting guide sequence portion
uuggagaaaccgaucugcugca

SEQ ID NO: 8003 - RNA, 22 nt, Artificial Sequence
  SARM1 targeting guide sequence portion
uuggccagcgccgacuuagugc

SEQ ID NO: 8004 - RNA, 22 nt, Artificial Sequence
  SARM1 targeting guide sequence portion
uugguagaguaggaaaccaggc

SEQ ID NO: 8005 - RNA, 22 nt, Artificial Sequence
  SARM1 targeting guide sequence portion
uuucaggcucuggauggcgccg

SEQ ID NO: 8006 - RNA, 22 nt, Artificial Sequence
  SARM1 targeting guide sequence portion
uuuccuacucuaccaauggcac

SEQ ID NO: 8007 - RNA, 22 nt, Artificial Sequence
  SARM1 targeting guide sequence portion
uuucuccaaguacugcgagagc

SEQ ID NO: 8008 - RNA, 20 nt, Artificial Sequence
  SARM1 targeting guide sequence portion
aaaucgggcaucacccgcaa

SEQ ID NO: 8009 - RNA, 20 nt, Artificial Sequence
  SARM1 targeting guide sequence portion
aacuccagaccgaccugggc

SEQ ID NO: 8010 - RNA, 20 nt, Artificial Sequence
  SARM1 targeting guide sequence portion
aagcaggucgccauccaccu

SEQ ID NO: 8011 - RNA, 20 nt, Artificial Sequence
  SARM1 targeting guide sequence portion
aaucgggcaucacccgcaag

SEQ ID NO: 8012 - RNA, 20 nt, Artificial Sequence
  SARM1 targeting guide sequence portion
accgaccugggcaugaaauc

SEQ ID NO: 8013 - RNA, 20 nt, Artificial Sequence
  SARM1 targeting guide sequence portion
accucuugcgggugaugccc

SEQ ID NO: 8014 - RNA, 20 nt, Artificial Sequence
  SARM1 targeting guide sequence portion
accugcuucugcggcucacg

SEQ ID NO: 8015 - RNA, 20 nt, Artificial Sequence
  SARM1 targeting guide sequence portion
accugggcaugaaaucgggc

SEQ ID NO: 8016 - RNA, 20 nt, Artificial Sequence
  SARM1 targeting guide sequence portion
acggaggaggaacuccagac

SEQ ID NO: 8017 - RNA, 20 nt, Artificial Sequence
  SARM1 targeting guide sequence portion
acuccagaccgaccugggca

SEQ ID NO: 8018 - RNA, 20 nt, Artificial Sequence
  SARM1 targeting guide sequence portion
agaagcaggucgccauccac

SEQ ID NO: 8019 - RNA, 20 nt, Artificial Sequence
  SARM1 targeting guide sequence portion
agaccgaccugggcaugaaa

SEQ ID NO: 8020 - RNA, 20 nt, Artificial Sequence
  SARM1 targeting guide sequence portion
agcagcagguggauggcgac

SEQ ID NO: 8021 - RNA, 20 nt, Artificial Sequence
  SARM1 targeting guide sequence portion
agcaggucgccauccaccug

SEQ ID NO: 8022 - RNA, 20 nt, Artificial Sequence
  SARM1 targeting guide sequence portion
agcagguggauggcgaccug

SEQ ID NO: 8023 - RNA, 20 nt, Artificial Sequence
  SARM1 targeting guide sequence portion
agccgcagaagcaggucgcc

SEQ ID NO: 8024 - RNA, 20 nt, Artificial Sequence
  SARM1 targeting guide sequence portion
aggaacuccagaccgaccug

SEQ ID NO: 8025 - RNA, 20 nt, Artificial Sequence
  SARM1 targeting guide sequence portion
aggagcagcagguggauggc

SEQ ID NO: 8026 - RNA, 20 nt, Artificial Sequence
  SARM1 targeting guide sequence portion
aggaggaacuccagaccgac

SEQ ID NO: 8027 - RNA, 20 nt, Artificial Sequence
  SARM1 targeting guide sequence portion
aggucgccauccaccugcug

SEQ ID NO: 8028 - RNA, 20 nt, Artificial Sequence
  SARM1 targeting guide sequence portion
aggucggucuggaguuccuc

SEQ ID NO: 8029 - RNA, 20 nt, Artificial Sequence
  SARM1 targeting guide sequence portion
agguggauggcgaccugcuu

SEQ ID NO: 8030 - RNA, 20 nt, Artificial Sequence
  SARM1 targeting guide sequence portion
aguuccuccuccgugagccg

SEQ ID NO: 8031 - RNA, 20 nt, Artificial Sequence
  SARM1 targeting guide sequence portion
aucgggcaucacccgcaaga

SEQ ID NO: 8032 - RNA, 20 nt, Artificial Sequence
  SARM1 targeting guide sequence portion
augaaaucgggcaucacccg

SEQ ID NO: 8033 - RNA, 20 nt, Artificial Sequence
  SARM1 targeting guide sequence portion
augcccaggucggucuggag

SEQ ID NO: 8034 - RNA, 20 nt, Artificial Sequence
  SARM1 targeting guide sequence portion
augcccgauuucaugcccag

SEQ ID NO: 8035 - RNA, 20 nt, Artificial Sequence
  SARM1 targeting guide sequence portion
auggcgaccugcuucugcgg

SEQ ID NO: 8036 - RNA, 20 nt, Artificial Sequence
  SARM1 targeting guide sequence portion
auuucaugcccaggucgguc

SEQ ID NO: 8037 - RNA, 20 nt, Artificial Sequence
  SARM1 targeting guide sequence portion
cacggaggaggaacuccaga

SEQ ID NO: 8038 - RNA, 20 nt, Artificial Sequence
  SARM1 targeting guide sequence portion
cagaagcaggucgccaucca

SEQ ID NO: 8039 - RNA, 20 nt, Artificial Sequence
  SARM1 targeting guide sequence portion
cagaccgaccugggcaugaa

SEQ ID NO: 8040 - RNA, 20 nt, Artificial Sequence
  SARM1 targeting guide sequence portion
cagcagguggauggcgaccu

SEQ ID NO: 8041 - RNA, 20 nt, Artificial Sequence
  SARM1 targeting guide sequence portion
caggagcagcagguggaugg

SEQ ID NO: 8042 - RNA, 20 nt, Artificial Sequence
  SARM1 targeting guide sequence portion
caggucgccauccaccugcu

SEQ ID NO: 8043 - RNA, 20 nt, Artificial Sequence
  SARM1 targeting guide sequence portion
caggucggucuggaguuccu

SEQ ID NO: 8044 - RNA, 20 nt, Artificial Sequence
  SARM1 targeting guide sequence portion
cagguggauggcgaccugcu

SEQ ID NO: 8045 - RNA, 20 nt, Artificial Sequence
  SARM1 targeting guide sequence portion
caugaaaucgggcaucaccc

SEQ ID NO: 8046 - RNA, 20 nt, Artificial Sequence
  SARM1 targeting guide sequence portion
caugcccaggucggucugga

SEQ ID NO: 8047 - RNA, 20 nt, Artificial Sequence
  SARM1 targeting guide sequence portion
ccagaccgaccugggcauga

SEQ ID NO: 8048 - RNA, 20 nt, Artificial Sequence
  SARM1 targeting guide sequence portion
ccaggagcagcagguggaug

SEQ ID NO: 8049 - RNA, 20 nt, Artificial Sequence
  SARM1 targeting guide sequence portion
ccaggucggucuggaguucc

SEQ ID NO: 8050 - RNA, 20 nt, Artificial Sequence
  SARM1 targeting guide sequence portion
cccaggagcagcagguggau

SEQ ID NO: 8051 - RNA, 20 nt, Artificial Sequence
  SARM1 targeting guide sequence portion
cccaggucggucuggaguuc

SEQ ID NO: 8052 - RNA, 20 nt, Artificial Sequence
  SARM1 targeting guide sequence portion
ccccaggagcagcaggugga

SEQ ID NO: 8053 - RNA, 20 nt, Artificial Sequence
  SARM1 targeting guide sequence portion
cccccaggagcagcaggugg

SEQ ID NO: 8054 - RNA, 20 nt, Artificial Sequence
  SARM1 targeting guide sequence portion
cccgauuucaugcccagguc

SEQ ID NO: 8055 - RNA, 20 nt, Artificial Sequence
  SARM1 targeting guide sequence portion
ccgaccugggcaugaaaucg

SEQ ID NO: 8056 - RNA, 20 nt, Artificial Sequence
  SARM1 targeting guide sequence portion
ccgauuucaugcccaggucg

SEQ ID NO: 8057 - RNA, 20 nt, Artificial Sequence
  SARM1 targeting guide sequence portion
ccgcagaagcaggucgccau

SEQ ID NO: 8058 - RNA, 20 nt, Artificial Sequence
  SARM1 targeting guide sequence portion
ccguaccucuugcgggugau

SEQ ID NO: 8059 - RNA, 20 nt, Artificial Sequence
  SARM1 targeting guide sequence portion
ccgugagccgcagaagcagg

SEQ ID NO: 8060 - RNA, 20 nt, Artificial Sequence
  SARM1 targeting guide sequence portion
ccuccgugagccgcagaagc

SEQ ID NO: 8061 - RNA, 20 nt, Artificial Sequence
  SARM1 targeting guide sequence portion
ccuccuccgugagccgcaga

SEQ ID NO: 8062 - RNA, 20 nt, Artificial Sequence
  SARM1 targeting guide sequence portion
ccucuugcgggugaugcccg

SEQ ID NO: 8063 - RNA, 20 nt, Artificial Sequence
  SARM1 targeting guide sequence portion
ccugcuucugcggcucacgg

SEQ ID NO: 8064 - RNA, 20 nt, Artificial Sequence
  SARM1 targeting guide sequence portion
ccugggcaugaaaucgggca

SEQ ID NO: 8065 - RNA, 20 nt, Artificial Sequence
  SARM1 targeting guide sequence portion
cgaccugcuucugcggcuca

SEQ ID NO: 8066 - RNA, 20 nt, Artificial Sequence
  SARM1 targeting guide sequence portion
cgaccugggcaugaaaucgg

SEQ ID NO: 8067 - RNA, 20 nt, Artificial Sequence
  SARM1 targeting guide sequence portion
cgauuucaugcccaggucgg

SEQ ID NO: 8068 - RNA, 20 nt, Artificial Sequence
  SARM1 targeting guide sequence portion
cgcagaagcaggucgccauc

SEQ ID NO: 8069 - RNA, 20 nt, Artificial Sequence
  SARM1 targeting guide sequence portion
cgccauccaccugcugcucc

SEQ ID NO: 8070 - RNA, 20 nt, Artificial Sequence
  SARM1 targeting guide sequence portion
cggaggaggaacuccagacc

SEQ ID NO: 8071 - RNA, 20 nt, Artificial Sequence
  SARM1 targeting guide sequence portion
cggcucacggaggaggaacu

SEQ ID NO: 8072 - RNA, 20 nt, Artificial Sequence
  SARM1 targeting guide sequence portion
cgggcaucacccgcaagagg

SEQ ID NO: 8073 - RNA, 20 nt, Artificial Sequence
  SARM1 targeting guide sequence portion
cgggugaugcccgauuucau

SEQ ID NO: 8074 - RNA, 20 nt, Artificial Sequence
  SARM1 targeting guide sequence portion
cggucuggaguuccuccucc

SEQ ID NO: 8075 - RNA, 20 nt, Artificial Sequence
  SARM1 targeting guide sequence portion
cguaccucuugcgggugaug

SEQ ID NO: 8076 - RNA, 20 nt, Artificial Sequence
  SARM1 targeting guide sequence portion
cgugagccgcagaagcaggu

SEQ ID NO: 8077 - RNA, 20 nt, Artificial Sequence
  SARM1 targeting guide sequence portion
cucacggaggaggaacucca

SEQ ID NO: 8078 - RNA, 20 nt, Artificial Sequence
  SARM1 targeting guide sequence portion
cuccagaccgaccugggcau

SEQ ID NO: 8079 - RNA, 20 nt, Artificial Sequence
  SARM1 targeting guide sequence portion
cuccgugagccgcagaagca

SEQ ID NO: 8080 - RNA, 20 nt, Artificial Sequence
  SARM1 targeting guide sequence portion
cuccuccgugagccgcagaa

SEQ ID NO: 8081 - RNA, 20 nt, Artificial Sequence
  SARM1 targeting guide sequence portion
cucuugcgggugaugcccga

SEQ ID NO: 8082 - RNA, 20 nt, Artificial Sequence
  SARM1 targeting guide sequence portion
cugcggcucacggaggagga

SEQ ID NO: 8083 - RNA, 20 nt, Artificial Sequence
  SARM1 targeting guide sequence portion
cugcuucugcggcucacgga

SEQ ID NO: 8084 - RNA, 20 nt, Artificial Sequence
  SARM1 targeting guide sequence portion
cuggaguuccuccuccguga

SEQ ID NO: 8085 - RNA, 20 nt, Artificial Sequence
  SARM1 targeting guide sequence portion
cugggcaugaaaucgggcau

SEQ ID NO: 8086 - RNA, 20 nt, Artificial Sequence
  SARM1 targeting guide sequence portion
cuucugcggcucacggagga

SEQ ID NO: 8087 - RNA, 20 nt, Artificial Sequence
  SARM1 targeting guide sequence portion
cuugcgggugaugcccgauu

SEQ ID NO: 8088 - RNA, 20 nt, Artificial Sequence
  SARM1 targeting guide sequence portion
gaaaucgggcaucacccgca

SEQ ID NO: 8089 - RNA, 20 nt, Artificial Sequence
  SARM1 targeting guide sequence portion
gaacuccagaccgaccuggg

SEQ ID NO: 8090 - RNA, 20 nt, Artificial Sequence
  SARM1 targeting guide sequence portion
gaagcaggucgccauccacc

SEQ ID NO: 8091 - RNA, 20 nt, Artificial Sequence
  SARM1 targeting guide sequence portion
gaccgaccugggcaugaaau

SEQ ID NO: 8092 - RNA, 20 nt, Artificial Sequence
  SARM1 targeting guide sequence portion
gaccugcuucugcggcucac

SEQ ID NO: 8093 - RNA, 20 nt, Artificial Sequence
  SARM1 targeting guide sequence portion
gaccugggcaugaaaucggg

SEQ ID NO: 8094 - RNA, 20 nt, Artificial Sequence
  SARM1 targeting guide sequence portion
gagcagcagguggauggcga

SEQ ID NO: 8095 - RNA, 20 nt, Artificial Sequence
  SARM1 targeting guide sequence portion
gagccgcagaagcaggucgc

SEQ ID NO: 8096 - RNA, 20 nt, Artificial Sequence
  SARM1 targeting guide sequence portion
gaggaacuccagaccgaccu

SEQ ID NO: 8097 - RNA, 20 nt, Artificial Sequence
  SARM1 targeting guide sequence portion
gaggaggaacuccagaccga

SEQ ID NO: 8098 - RNA, 20 nt, Artificial Sequence
  SARM1 targeting guide sequence portion
gaguuccuccuccgugagcc

SEQ ID NO: 8099 - RNA, 20 nt, Artificial Sequence
  SARM1 targeting guide sequence portion
gaugcccgauuucaugccca

SEQ ID NO: 8100 - RNA, 20 nt, Artificial Sequence
  SARM1 targeting guide sequence portion
gauggcgaccugcuucugcg

SEQ ID NO: 8101 - RNA, 20 nt, Artificial Sequence
  SARM1 targeting guide sequence portion
gauuucaugcccaggucggu

SEQ ID NO: 8102 - RNA, 20 nt, Artificial Sequence
  SARM1 targeting guide sequence portion
gcagaagcaggucgccaucc

SEQ ID NO: 8103 - RNA, 20 nt, Artificial Sequence
  SARM1 targeting guide sequence portion
gcagcagguggauggcgacc

SEQ ID NO: 8104 - RNA, 20 nt, Artificial Sequence
  SARM1 targeting guide sequence portion
gcaggucgccauccaccugc

SEQ ID NO: 8105 - RNA, 20 nt, Artificial Sequence
  SARM1 targeting guide sequence portion
gcagguggauggcgaccugc

SEQ ID NO: 8106 - RNA, 20 nt, Artificial Sequence
  SARM1 targeting guide sequence portion
gcaugaaaucgggcaucacc

SEQ ID NO: 8107 - RNA, 20 nt, Artificial Sequence
  SARM1 targeting guide sequence portion
gcccaggucggucuggaguu

SEQ ID NO: 8108 - RNA, 20 nt, Artificial Sequence
  SARM1 targeting guide sequence portion
gcccgauuucaugcccaggu

SEQ ID NO: 8109 - RNA, 20 nt, Artificial Sequence
  SARM1 targeting guide sequence portion
gccgcagaagcaggucgcca

SEQ ID NO: 8110 - RNA, 20 nt, Artificial Sequence
  SARM1 targeting guide sequence portion
gcgaccugcuucugcggcuc

SEQ ID NO: 8111 - RNA, 20 nt, Artificial Sequence
  SARM1 targeting guide sequence portion
gcggcucacggaggaggaac

SEQ ID NO: 8112 - RNA, 20 nt, Artificial Sequence
  SARM1 targeting guide sequence portion
gcgggugaugcccgauuuca

SEQ ID NO: 8113 - RNA, 20 nt, Artificial Sequence
  SARM1 targeting guide sequence portion
gcucacggaggaggaacucc

SEQ ID NO: 8114 - RNA, 20 nt, Artificial Sequence
  SARM1 targeting guide sequence portion
gcuucugcggcucacggagg

SEQ ID NO: 8115 - RNA, 20 nt, Artificial Sequence
  SARM1 targeting guide sequence portion
ggaacuccagaccgaccugg

SEQ ID NO: 8116 - RNA, 20 nt, Artificial Sequence
  SARM1 targeting guide sequence portion
ggagcagcagguggauggcg

SEQ ID NO: 8117 - RNA, 20 nt, Artificial Sequence
  SARM1 targeting guide sequence portion
ggaggaacuccagaccgacc

SEQ ID NO: 8118 - RNA, 20 nt, Artificial Sequence
  SARM1 targeting guide sequence portion
ggaggaggaacuccagaccg

SEQ ID NO: 8119 - RNA, 20 nt, Artificial Sequence
  SARM1 targeting guide sequence portion
ggaguuccuccuccgugagc

SEQ ID NO: 8120 - RNA, 20 nt, Artificial Sequence
  SARM1 targeting guide sequence portion
ggauggcgaccugcuucugc

SEQ ID NO: 8121 - RNA, 20 nt, Artificial Sequence
  SARM1 targeting guide sequence portion
ggcaugaaaucgggcaucac

SEQ ID NO: 8122 - RNA, 20 nt, Artificial Sequence
  SARM1 targeting guide sequence portion
ggcgaccugcuucugcggcu

SEQ ID NO: 8123 - RNA, 20 nt, Artificial Sequence
  SARM1 targeting guide sequence portion
ggcucacggaggaggaacuc

SEQ ID NO: 8124 - RNA, 20 nt, Artificial Sequence
  SARM1 targeting guide sequence portion
gggcaugaaaucgggcauca

SEQ ID NO: 8125 - RNA, 20 nt, Artificial Sequence
  SARM1 targeting guide sequence portion
gggugaugcccgauuucaug

SEQ ID NO: 8126 - RNA, 20 nt, Artificial Sequence
  SARM1 targeting guide sequence portion
ggucgccauccaccugcugc

SEQ ID NO: 8127 - RNA, 20 nt, Artificial Sequence
  SARM1 targeting guide sequence portion
ggucggucuggaguuccucc

SEQ ID NO: 8128 - RNA, 20 nt, Artificial Sequence
  SARM1 targeting guide sequence portion
ggucuggaguuccuccuccg

SEQ ID NO: 8129 - RNA, 20 nt, Artificial Sequence
  SARM1 targeting guide sequence portion
ggugaugcccgauuucaugc

SEQ ID NO: 8130 - RNA, 20 nt, Artificial Sequence
  SARM1 targeting guide sequence portion
gguggauggcgaccugcuuc

SEQ ID NO: 8131 - RNA, 20 nt, Artificial Sequence
  SARM1 targeting guide sequence portion
guaccucuugcgggugaugc

SEQ ID NO: 8132 - RNA, 20 nt, Artificial Sequence
  SARM1 targeting guide sequence portion
gucgccauccaccugcugcu

SEQ ID NO: 8133 - RNA, 20 nt, Artificial Sequence
  SARM1 targeting guide sequence portion
gucggucuggaguuccuccu

SEQ ID NO: 8134 - RNA, 20 nt, Artificial Sequence
  SARM1 targeting guide sequence portion
gucuggaguuccuccuccgu

SEQ ID NO: 8135 - RNA, 20 nt, Artificial Sequence
  SARM1 targeting guide sequence portion
gugagccgcagaagcagguc

SEQ ID NO: 8136 - RNA, 20 nt, Artificial Sequence
  SARM1 targeting guide sequence portion
gugaugcccgauuucaugcc

SEQ ID NO: 8137 - RNA, 20 nt, Artificial Sequence
  SARM1 targeting guide sequence portion
guggauggcgaccugcuucu

SEQ ID NO: 8138 - RNA, 20 nt, Artificial Sequence
  SARM1 targeting guide sequence portion
guuccuccuccgugagccgc

SEQ ID NO: 8139 - RNA, 20 nt, Artificial Sequence
  SARM1 targeting guide sequence portion
uaccucuugcgggugaugcc

SEQ ID NO: 8140 - RNA, 20 nt, Artificial Sequence
  SARM1 targeting guide sequence portion
ucacggaggaggaacuccag

SEQ ID NO: 8141 - RNA, 20 nt, Artificial Sequence
  SARM1 targeting guide sequence portion
ucaugcccaggucggucugg

SEQ ID NO: 8142 - RNA, 20 nt, Artificial Sequence
  SARM1 targeting guide sequence portion
uccagaccgaccugggcaug

SEQ ID NO: 8143 - RNA, 20 nt, Artificial Sequence
  SARM1 targeting guide sequence portion
uccguaccucuugcggguga

SEQ ID NO: 8144 - RNA, 20 nt, Artificial Sequence
  SARM1 targeting guide sequence portion
uccgugagccgcagaagcag

SEQ ID NO: 8145 - RNA, 20 nt, Artificial Sequence
  SARM1 targeting guide sequence portion
uccuccgugagccgcagaag

SEQ ID NO: 8146 - RNA, 20 nt, Artificial Sequence
  SARM1 targeting guide sequence portion
uccuccuccgugagccgcag

SEQ ID NO: 8147 - RNA, 20 nt, Artificial Sequence
  SARM1 targeting guide sequence portion
ucgccauccaccugcugcuc

SEQ ID NO: 8148 - RNA, 20 nt, Artificial Sequence
  SARM1 targeting guide sequence portion
ucgggcaucacccgcaagag

SEQ ID NO: 8149 - RNA, 20 nt, Artificial Sequence
  SARM1 targeting guide sequence portion
ucggucuggaguuccuccuc

SEQ ID NO: 8150 - RNA, 20 nt, Artificial Sequence
  SARM1 targeting guide sequence portion
ucugcggcucacggaggagg

SEQ ID NO: 8151 - RNA, 20 nt, Artificial Sequence
  SARM1 targeting guide sequence portion
ucuggaguuccuccuccgug

SEQ ID NO: 8152 - RNA, 20 nt, Artificial Sequence
  SARM1 targeting guide sequence portion
ucuugcgggugaugcccgau

SEQ ID NO: 8153 - RNA, 20 nt, Artificial Sequence
  SARM1 targeting guide sequence portion
ugaaaucgggcaucacccgc

SEQ ID NO: 8154 - RNA, 20 nt, Artificial Sequence
  SARM1 targeting guide sequence portion
ugagccgcagaagcaggucg

SEQ ID NO: 8155 - RNA, 20 nt, Artificial Sequence
  SARM1 targeting guide sequence portion
ugaugcccgauuucaugccc

SEQ ID NO: 8156 - RNA, 20 nt, Artificial Sequence
  SARM1 targeting guide sequence portion
ugcccaggucggucuggagu

SEQ ID NO: 8157 - RNA, 20 nt, Artificial Sequence
  SARM1 targeting guide sequence portion
ugcccgauuucaugcccagg

SEQ ID NO: 8158 - RNA, 20 nt, Artificial Sequence
  SARM1 targeting guide sequence portion
ugcggcucacggaggaggaa

SEQ ID NO: 8159 - RNA, 20 nt, Artificial Sequence
  SARM1 targeting guide sequence portion
ugcgggugaugcccgauuuc

SEQ ID NO: 8160 - RNA, 20 nt, Artificial Sequence
  SARM1 targeting guide sequence portion
ugcuucugcggcucacggag

SEQ ID NO: 8161 - RNA, 20 nt, Artificial Sequence
  SARM1 targeting guide sequence portion
uggaguuccuccuccgugag

SEQ ID NO: 8162 - RNA, 20 nt, Artificial Sequence
  SARM1 targeting guide sequence portion
uggauggcgaccugcuucug

SEQ ID NO: 8163 - RNA, 20 nt, Artificial Sequence
  SARM1 targeting guide sequence portion
uggcgaccugcuucugcggc

SEQ ID NO: 8164 - RNA, 20 nt, Artificial Sequence
  SARM1 targeting guide sequence portion
ugggcaugaaaucgggcauc

SEQ ID NO: 8165 - RNA, 20 nt, Artificial Sequence
  SARM1 targeting guide sequence portion
uucaugcccaggucggucug

SEQ ID NO: 8166 - RNA, 20 nt, Artificial Sequence
  SARM1 targeting guide sequence portion
uuccuccuccgugagccgca

SEQ ID NO: 8167 - RNA, 20 nt, Artificial Sequence
  SARM1 targeting guide sequence portion
uucugcggcucacggaggag

SEQ ID NO: 8168 - RNA, 20 nt, Artificial Sequence
  SARM1 targeting guide sequence portion
uugcgggugaugcccgauuu

SEQ ID NO: 8169 - RNA, 20 nt, Artificial Sequence
  SARM1 targeting guide sequence portion
uuucaugcccaggucggucu

SEQ ID NO: 8170 - RNA, 21 nt, Artificial Sequence
  SARM1 targeting guide sequence portion
aaaucgggcaucacccgcaag

SEQ ID NO: 8171 - RNA, 21 nt, Artificial Sequence
  SARM1 targeting guide sequence portion
aacuccagaccgaccugggca

SEQ ID NO: 8172 - RNA, 21 nt, Artificial Sequence
  SARM1 targeting guide sequence portion
aagcaggucgccauccaccug

SEQ ID NO: 8173 - RNA, 21 nt, Artificial Sequence
  SARM1 targeting guide sequence portion
aaucgggcaucacccgcaaga

SEQ ID NO: 8174 - RNA, 21 nt, Artificial Sequence
  SARM1 targeting guide sequence portion
accgaccugggcaugaaaucg

SEQ ID NO: 8175 - RNA, 21 nt, Artificial Sequence
  SARM1 targeting guide sequence portion
accucuugcgggugaugcccg

SEQ ID NO: 8176 - RNA, 21 nt, Artificial Sequence
  SARM1 targeting guide sequence portion
accugcuucugcggcucacgg

SEQ ID NO: 8177 - RNA, 21 nt, Artificial Sequence
  SARM1 targeting guide sequence portion
accugggcaugaaaucgggca

SEQ ID NO: 8178 - RNA, 21 nt, Artificial Sequence
  SARM1 targeting guide sequence portion
acggaggaggaacuccagacc

SEQ ID NO: 8179 - RNA, 21 nt, Artificial Sequence
  SARM1 targeting guide sequence portion
acuccagaccgaccugggcau

SEQ ID NO: 8180 - RNA, 21 nt, Artificial Sequence
  SARM1 targeting guide sequence portion
agaagcaggucgccauccacc

SEQ ID NO: 8181 - RNA, 21 nt, Artificial Sequence
  SARM1 targeting guide sequence portion
agaccgaccugggcaugaaau

SEQ ID NO: 8182 - RNA, 21 nt, Artificial Sequence
  SARM1 targeting guide sequence portion
agcagcagguggauggcgacc

SEQ ID NO: 8183 - RNA, 21 nt, Artificial Sequence
  SARM1 targeting guide sequence portion
agcaggucgccauccaccugc

SEQ ID NO: 8184 - RNA, 21 nt, Artificial Sequence
  SARM1 targeting guide sequence portion
agcagguggauggcgaccugc

SEQ ID NO: 8185 - RNA, 21 nt, Artificial Sequence
  SARM1 targeting guide sequence portion
agccgcagaagcaggucgcca

SEQ ID NO: 8186 - RNA, 21 nt, Artificial Sequence
  SARM1 targeting guide sequence portion
aggaacuccagaccgaccugg

SEQ ID NO: 8187 - RNA, 21 nt, Artificial Sequence
  SARM1 targeting guide sequence portion
aggagcagcagguggauggcg

SEQ ID NO: 8188 - RNA, 21 nt, Artificial Sequence
  SARM1 targeting guide sequence portion
aggaggaacuccagaccgacc

SEQ ID NO: 8189 - RNA, 21 nt, Artificial Sequence
  SARM1 targeting guide sequence portion
aggucgccauccaccugcugc

SEQ ID NO: 8190 - RNA, 21 nt, Artificial Sequence
  SARM1 targeting guide sequence portion
aggucggucuggaguuccucc

SEQ ID NO: 8191 - RNA, 21 nt, Artificial Sequence
  SARM1 targeting guide sequence portion
agguggauggcgaccugcuuc

SEQ ID NO: 8192 - RNA, 21 nt, Artificial Sequence
  SARM1 targeting guide sequence portion
aguuccuccuccgugagccgc

SEQ ID NO: 8193 - RNA, 21 nt, Artificial Sequence
  SARM1 targeting guide sequence portion
aucgggcaucacccgcaagag

SEQ ID NO: 8194 - RNA, 21 nt, Artificial Sequence
  SARM1 targeting guide sequence portion
augaaaucgggcaucacccgc

SEQ ID NO: 8195 - RNA, 21 nt, Artificial Sequence
  SARM1 targeting guide sequence portion
augcccaggucggucuggagu

SEQ ID NO: 8196 - RNA, 21 nt, Artificial Sequence
  SARM1 targeting guide sequence portion
augcccgauuucaugcccagg

SEQ ID NO: 8197 - RNA, 21 nt, Artificial Sequence
  SARM1 targeting guide sequence portion
auggcgaccugcuucugcggc

SEQ ID NO: 8198 - RNA, 21 nt, Artificial Sequence
  SARM1 targeting guide sequence portion
auuucaugcccaggucggucu

SEQ ID NO: 8199 - RNA, 21 nt, Artificial Sequence
  SARM1 targeting guide sequence portion
cacggaggaggaacuccagac

SEQ ID NO: 8200 - RNA, 21 nt, Artificial Sequence
  SARM1 targeting guide sequence portion
cagaagcaggucgccauccac

SEQ ID NO: 8201 - RNA, 21 nt, Artificial Sequence
  SARM1 targeting guide sequence portion
cagaccgaccugggcaugaaa

SEQ ID NO: 8202 - RNA, 21 nt, Artificial Sequence
  SARM1 targeting guide sequence portion
cagcagguggauggcgaccug

SEQ ID NO: 8203 - RNA, 21 nt, Artificial Sequence
  SARM1 targeting guide sequence portion
caggagcagcagguggauggc

SEQ ID NO: 8204 - RNA, 21 nt, Artificial Sequence
  SARM1 targeting guide sequence portion
caggucgccauccaccugcug

SEQ ID NO: 8205 - RNA, 21 nt, Artificial Sequence
  SARM1 targeting guide sequence portion
caggucggucuggaguuccuc

SEQ ID NO: 8206 - RNA, 21 nt, Artificial Sequence
  SARM1 targeting guide sequence portion
cagguggauggcgaccugcuu

SEQ ID NO: 8207 - RNA, 21 nt, Artificial Sequence
  SARM1 targeting guide sequence portion
caugaaaucgggcaucacccg

SEQ ID NO: 8208 - RNA, 21 nt, Artificial Sequence
  SARM1 targeting guide sequence portion
caugcccaggucggucuggag

SEQ ID NO: 8209 - RNA, 21 nt, Artificial Sequence
  SARM1 targeting guide sequence portion
ccagaccgaccugggcaugaa

SEQ ID NO: 8210 - RNA, 21 nt, Artificial Sequence
  SARM1 targeting guide sequence portion
ccaggagcagcagguggaugg

SEQ ID NO: 8211 - RNA, 21 nt, Artificial Sequence
  SARM1 targeting guide sequence portion
ccaggucggucuggaguuccu

SEQ ID NO: 8212 - RNA, 21 nt, Artificial Sequence
  SARM1 targeting guide sequence portion
cccaggagcagcagguggaug

SEQ ID NO: 8213 - RNA, 21 nt, Artificial Sequence
  SARM1 targeting guide sequence portion
cccaggucggucuggaguucc

SEQ ID NO: 8214 - RNA, 21 nt, Artificial Sequence
  SARM1 targeting guide sequence portion
ccccaggagcagcagguggau

SEQ ID NO: 8215 - RNA, 21 nt, Artificial Sequence
  SARM1 targeting guide sequence portion
cccccaggagcagcaggugga

SEQ ID NO: 8216 - RNA, 21 nt, Artificial Sequence
  SARM1 targeting guide sequence portion
cccgauuucaugcccaggucg

SEQ ID NO: 8217 - RNA, 21 nt, Artificial Sequence
  SARM1 targeting guide sequence portion
ccgaccugggcaugaaaucgg

SEQ ID NO: 8218 - RNA, 21 nt, Artificial Sequence
  SARM1 targeting guide sequence portion
ccgauuucaugcccaggucgg

SEQ ID NO: 8219 - RNA, 21 nt, Artificial Sequence
  SARM1 targeting guide sequence portion
ccgcagaagcaggucgccauc

SEQ ID NO: 8220 - RNA, 21 nt, Artificial Sequence
  SARM1 targeting guide sequence portion
ccguaccucuugcgggugaug

SEQ ID NO: 8221 - RNA, 21 nt, Artificial Sequence
  SARM1 targeting guide sequence portion
ccgugagccgcagaagcaggu

SEQ ID NO: 8222 - RNA, 21 nt, Artificial Sequence
  SARM1 targeting guide sequence portion
ccuccgugagccgcagaagca

SEQ ID NO: 8223 - RNA, 21 nt, Artificial Sequence
  SARM1 targeting guide sequence portion
ccuccuccgugagccgcagaa

SEQ ID NO: 8224 - RNA, 21 nt, Artificial Sequence
  SARM1 targeting guide sequence portion
ccucuugcgggugaugcccga

SEQ ID NO: 8225 - RNA, 21 nt, Artificial Sequence
  SARM1 targeting guide sequence portion
ccugcuucugcggcucacgga

SEQ ID NO: 8226 - RNA, 21 nt, Artificial Sequence
  SARM1 targeting guide sequence portion
ccugggcaugaaaucgggcau

SEQ ID NO: 8227 - RNA, 21 nt, Artificial Sequence
  SARM1 targeting guide sequence portion
cgaccugcuucugcggcucac

SEQ ID NO: 8228 - RNA, 21 nt, Artificial Sequence
  SARM1 targeting guide sequence portion
cgaccugggcaugaaaucggg

SEQ ID NO: 8229 - RNA, 21 nt, Artificial Sequence
  SARM1 targeting guide sequence portion
cgauuucaugcccaggucggu

SEQ ID NO: 8230 - RNA, 21 nt, Artificial Sequence
  SARM1 targeting guide sequence portion
cgcagaagcaggucgccaucc

SEQ ID NO: 8231 - RNA, 21 nt, Artificial Sequence
  SARM1 targeting guide sequence portion
cggaggaggaacuccagaccg

SEQ ID NO: 8232 - RNA, 21 nt, Artificial Sequence
  SARM1 targeting guide sequence portion
cggcucacggaggaggaacuc

SEQ ID NO: 8233 - RNA, 21 nt, Artificial Sequence
  SARM1 targeting guide sequence portion
cgggugaugcccgauuucaug

SEQ ID NO: 8234 - RNA, 21 nt, Artificial Sequence
  SARM1 targeting guide sequence portion
cggucuggaguuccuccuccg

SEQ ID NO: 8235 - RNA, 21 nt, Artificial Sequence
  SARM1 targeting guide sequence portion
cguaccucuugcgggugaugc

SEQ ID NO: 8236 - RNA, 21 nt, Artificial Sequence
  SARM1 targeting guide sequence portion
cgugagccgcagaagcagguc

SEQ ID NO: 8237 - RNA, 21 nt, Artificial Sequence
  SARM1 targeting guide sequence portion
cucacggaggaggaacuccag

SEQ ID NO: 8238 - RNA, 21 nt, Artificial Sequence
  SARM1 targeting guide sequence portion
cuccagaccgaccugggcaug

SEQ ID NO: 8239 - RNA, 21 nt, Artificial Sequence
  SARM1 targeting guide sequence portion
cuccgugagccgcagaagcag

SEQ ID NO: 8240 - RNA, 21 nt, Artificial Sequence
  SARM1 targeting guide sequence portion
cuccuccgugagccgcagaag

SEQ ID NO: 8241 - RNA, 21 nt, Artificial Sequence
  SARM1 targeting guide sequence portion
cucuugcgggugaugcccgau

SEQ ID NO: 8242 - RNA, 21 nt, Artificial Sequence
  SARM1 targeting guide sequence portion
cugcggcucacggaggaggaa

SEQ ID NO: 8243 - RNA, 21 nt, Artificial Sequence
  SARM1 targeting guide sequence portion
cugcuucugcggcucacggag

SEQ ID NO: 8244 - RNA, 21 nt, Artificial Sequence
  SARM1 targeting guide sequence portion
cuggaguuccuccuccgugag

SEQ ID NO: 8245 - RNA, 21 nt, Artificial Sequence
  SARM1 targeting guide sequence portion
cugggcaugaaaucgggcauc

SEQ ID NO: 8246 - RNA, 21 nt, Artificial Sequence
  SARM1 targeting guide sequence portion
cuucugcggcucacggaggag

SEQ ID NO: 8247 - RNA, 21 nt, Artificial Sequence
  SARM1 targeting guide sequence portion
cuugcgggugaugcccgauuu

SEQ ID NO: 8248 - RNA, 21 nt, Artificial Sequence
  SARM1 targeting guide sequence portion
gaaaucgggcaucacccgcaa

SEQ ID NO: 8249 - RNA, 21 nt, Artificial Sequence
  SARM1 targeting guide sequence portion
gaacuccagaccgaccugggc

SEQ ID NO: 8250 - RNA, 21 nt, Artificial Sequence
  SARM1 targeting guide sequence portion
gaagcaggucgccauccaccu

SEQ ID NO: 8251 - RNA, 21 nt, Artificial Sequence
  SARM1 targeting guide sequence portion
gaccgaccugggcaugaaauc

SEQ ID NO: 8252 - RNA, 21 nt, Artificial Sequence
  SARM1 targeting guide sequence portion
gaccugcuucugcggcucacg

SEQ ID NO: 8253 - RNA, 21 nt, Artificial Sequence
  SARM1 targeting guide sequence portion
gaccugggcaugaaaucgggc

SEQ ID NO: 8254 - RNA, 21 nt, Artificial Sequence
  SARM1 targeting guide sequence portion
gagcagcagguggauggcgac

SEQ ID NO: 8255 - RNA, 21 nt, Artificial Sequence
  SARM1 targeting guide sequence portion
gagccgcagaagcaggucgcc

SEQ ID NO: 8256 - RNA, 21 nt, Artificial Sequence
  SARM1 targeting guide sequence portion
gaggaacuccagaccgaccug

SEQ ID NO: 8257 - RNA, 21 nt, Artificial Sequence
  SARM1 targeting guide sequence portion
gaggaggaacuccagaccgac

SEQ ID NO: 8258 - RNA, 21 nt, Artificial Sequence
  SARM1 targeting guide sequence portion
gaguuccuccuccgugagccg

SEQ ID NO: 8259 - RNA, 21 nt, Artificial Sequence
  SARM1 targeting guide sequence portion
gaugcccgauuucaugcccag

SEQ ID NO: 8260 - RNA, 21 nt, Artificial Sequence
  SARM1 targeting guide sequence portion
gauggcgaccugcuucugcgg

SEQ ID NO: 8261 - RNA, 21 nt, Artificial Sequence
  SARM1 targeting guide sequence portion
gauuucaugcccaggucgguc

SEQ ID NO: 8262 - RNA, 21 nt, Artificial Sequence
  SARM1 targeting guide sequence portion
gcagaagcaggucgccaucca

SEQ ID NO: 8263 - RNA, 21 nt, Artificial Sequence
  SARM1 targeting guide sequence portion
gcagcagguggauggcgaccu

SEQ ID NO: 8264 - RNA, 21 nt, Artificial Sequence
  SARM1 targeting guide sequence portion
gcaggucgccauccaccugcu

SEQ ID NO: 8265 - RNA, 21 nt, Artificial Sequence
  SARM1 targeting guide sequence portion
gcagguggauggcgaccugcu

SEQ ID NO: 8266 - RNA, 21 nt, Artificial Sequence
  SARM1 targeting guide sequence portion
gcaugaaaucgggcaucaccc

SEQ ID NO: 8267 - RNA, 21 nt, Artificial Sequence
  SARM1 targeting guide sequence portion
gcccaggucggucuggaguuc

SEQ ID NO: 8268 - RNA, 21 nt, Artificial Sequence
  SARM1 targeting guide sequence portion
gcccgauuucaugcccagguc

SEQ ID NO: 8269 - RNA, 21 nt, Artificial Sequence
  SARM1 targeting guide sequence portion
gccgcagaagcaggucgccau

SEQ ID NO: 8270 - RNA, 21 nt, Artificial Sequence
  SARM1 targeting guide sequence portion
gcgaccugcuucugcggcuca

SEQ ID NO: 8271 - RNA, 21 nt, Artificial Sequence
  SARM1 targeting guide sequence portion
gcggcucacggaggaggaacu

SEQ ID NO: 8272 - RNA, 21 nt, Artificial Sequence
  SARM1 targeting guide sequence portion
gcgggugaugcccgauuucau

SEQ ID NO: 8273 - RNA, 21 nt, Artificial Sequence
  SARM1 targeting guide sequence portion
gcucacggaggaggaacucca

SEQ ID NO: 8274 - RNA, 21 nt, Artificial Sequence
  SARM1 targeting guide sequence portion
gcuucugcggcucacggagga

SEQ ID NO: 8275 - RNA, 21 nt, Artificial Sequence
  SARM1 targeting guide sequence portion
ggaacuccagaccgaccuggg

SEQ ID NO: 8276 - RNA, 21 nt, Artificial Sequence
  SARM1 targeting guide sequence portion
ggagcagcagguggauggcga

SEQ ID NO: 8277 - RNA, 21 nt, Artificial Sequence
  SARM1 targeting guide sequence portion
ggaggaacuccagaccgaccu

SEQ ID NO: 8278 - RNA, 21 nt, Artificial Sequence
  SARM1 targeting guide sequence portion
ggaggaggaacuccagaccga

SEQ ID NO: 8279 - RNA, 21 nt, Artificial Sequence
  SARM1 targeting guide sequence portion
ggaguuccuccuccgugagcc

SEQ ID NO: 8280 - RNA, 21 nt, Artificial Sequence
  SARM1 targeting guide sequence portion
ggauggcgaccugcuucugcg

SEQ ID NO: 8281 - RNA, 21 nt, Artificial Sequence
  SARM1 targeting guide sequence portion
ggcaugaaaucgggcaucacc

SEQ ID NO: 8282 - RNA, 21 nt, Artificial Sequence
  SARM1 targeting guide sequence portion
ggcgaccugcuucugcggcuc

SEQ ID NO: 8283 - RNA, 21 nt, Artificial Sequence
  SARM1 targeting guide sequence portion
ggcucacggaggaggaacucc

SEQ ID NO: 8284 - RNA, 21 nt, Artificial Sequence
  SARM1 targeting guide sequence portion
gggcaugaaaucgggcaucac

SEQ ID NO: 8285 - RNA, 21 nt, Artificial Sequence
  SARM1 targeting guide sequence portion
gggugaugcccgauuucaugc

SEQ ID NO: 8286 - RNA, 21 nt, Artificial Sequence
  SARM1 targeting guide sequence portion
ggucgccauccaccugcugcu

SEQ ID NO: 8287 - RNA, 21 nt, Artificial Sequence
  SARM1 targeting guide sequence portion
ggucggucuggaguuccuccu

SEQ ID NO: 8288 - RNA, 21 nt, Artificial Sequence
  SARM1 targeting guide sequence portion
ggucuggaguuccuccuccgu

SEQ ID NO: 8289 - RNA, 21 nt, Artificial Sequence
  SARM1 targeting guide sequence portion
ggugaugcccgauuucaugcc

SEQ ID NO: 8290 - RNA, 21 nt, Artificial Sequence
  SARM1 targeting guide sequence portion
gguggauggcgaccugcuucu

SEQ ID NO: 8291 - RNA, 21 nt, Artificial Sequence
  SARM1 targeting guide sequence portion
guaccucuugcgggugaugcc

SEQ ID NO: 8292 - RNA, 21 nt, Artificial Sequence
  SARM1 targeting guide sequence portion
gucgccauccaccugcugcuc

SEQ ID NO: 8293 - RNA, 21 nt, Artificial Sequence
  SARM1 targeting guide sequence portion
gucggucuggaguuccuccuc

SEQ ID NO: 8294 - RNA, 21 nt, Artificial Sequence
  SARM1 targeting guide sequence portion
gucuggaguuccuccuccgug

SEQ ID NO: 8295 - RNA, 21 nt, Artificial Sequence
  SARM1 targeting guide sequence portion
gugagccgcagaagcaggucg

SEQ ID NO: 8296 - RNA, 21 nt, Artificial Sequence
  SARM1 targeting guide sequence portion
gugaugcccgauuucaugccc

SEQ ID NO: 8297 - RNA, 21 nt, Artificial Sequence
  SARM1 targeting guide sequence portion
guggauggcgaccugcuucug

SEQ ID NO: 8298 - RNA, 21 nt, Artificial Sequence
  SARM1 targeting guide sequence portion
guuccuccuccgugagccgca

SEQ ID NO: 8299 - RNA, 21 nt, Artificial Sequence
  SARM1 targeting guide sequence portion
uaccucuugcgggugaugccc

SEQ ID NO: 8300 - RNA, 21 nt, Artificial Sequence
  SARM1 targeting guide sequence portion
ucacggaggaggaacuccaga

SEQ ID NO: 8301 - RNA, 21 nt, Artificial Sequence
  SARM1 targeting guide sequence portion
ucaugcccaggucggucugga

SEQ ID NO: 8302 - RNA, 21 nt, Artificial Sequence
  SARM1 targeting guide sequence portion
uccagaccgaccugggcauga

SEQ ID NO: 8303 - RNA, 21 nt, Artificial Sequence
  SARM1 targeting guide sequence portion
uccguaccucuugcgggugau

SEQ ID NO: 8304 - RNA, 21 nt, Artificial Sequence
  SARM1 targeting guide sequence portion
uccgugagccgcagaagcagg

SEQ ID NO: 8305 - RNA, 21 nt, Artificial Sequence
  SARM1 targeting guide sequence portion
uccuccgugagccgcagaagc

SEQ ID NO: 8306 - RNA, 21 nt, Artificial Sequence
  SARM1 targeting guide sequence portion
uccuccuccgugagccgcaga

SEQ ID NO: 8307 - RNA, 21 nt, Artificial Sequence
  SARM1 targeting guide sequence portion
ucgccauccaccugcugcucc

SEQ ID NO: 8308 - RNA, 21 nt, Artificial Sequence
  SARM1 targeting guide sequence portion
ucgggcaucacccgcaagagg

SEQ ID NO: 8309 - RNA, 21 nt, Artificial Sequence
  SARM1 targeting guide sequence portion
ucggucuggaguuccuccucc

SEQ ID NO: 8310 - RNA, 21 nt, Artificial Sequence
  SARM1 targeting guide sequence portion
ucugcggcucacggaggagga

SEQ ID NO: 8311 - RNA, 21 nt, Artificial Sequence
  SARM1 targeting guide sequence portion
ucuggaguuccuccuccguga

SEQ ID NO: 8312 - RNA, 21 nt, Artificial Sequence
  SARM1 targeting guide sequence portion
ucuugcgggugaugcccgauu

SEQ ID NO: 8313 - RNA, 21 nt, Artificial Sequence
  SARM1 targeting guide sequence portion
ugaaaucgggcaucacccgca

SEQ ID NO: 8314 - RNA, 21 nt, Artificial Sequence
  SARM1 targeting guide sequence portion
ugagccgcagaagcaggucgc

SEQ ID NO: 8315 - RNA, 21 nt, Artificial Sequence
  SARM1 targeting guide sequence portion
ugaugcccgauuucaugccca

SEQ ID NO: 8316 - RNA, 21 nt, Artificial Sequence
  SARM1 targeting guide sequence portion
ugcccaggucggucuggaguu

SEQ ID NO: 8317 - RNA, 21 nt, Artificial Sequence
  SARM1 targeting guide sequence portion
ugcccgauuucaugcccaggu

SEQ ID NO: 8318 - RNA, 21 nt, Artificial Sequence
  SARM1 targeting guide sequence portion
ugcggcucacggaggaggaac

SEQ ID NO: 8319 - RNA, 21 nt, Artificial Sequence
  SARM1 targeting guide sequence portion
ugcgggugaugcccgauuuca

SEQ ID NO: 8320 - RNA, 21 nt, Artificial Sequence
  SARM1 targeting guide sequence portion
ugcuucugcggcucacggagg

SEQ ID NO: 8321 - RNA, 21 nt, Artificial Sequence
  SARM1 targeting guide sequence portion
uggaguuccuccuccgugagc

SEQ ID NO: 8322 - RNA, 21 nt, Artificial Sequence
  SARM1 targeting guide sequence portion
uggauggcgaccugcuucugc

SEQ ID NO: 8323 - RNA, 21 nt, Artificial Sequence
  SARM1 targeting guide sequence portion
uggcgaccugcuucugcggcu

SEQ ID NO: 8324 - RNA, 21 nt, Artificial Sequence
  SARM1 targeting guide sequence portion
ugggcaugaaaucgggcauca

SEQ ID NO: 8325 - RNA, 21 nt, Artificial Sequence
  SARM1 targeting guide sequence portion
uucaugcccaggucggucugg

SEQ ID NO: 8326 - RNA, 21 nt, Artificial Sequence
  SARM1 targeting guide sequence portion
uuccuccuccgugagccgcag

SEQ ID NO: 8327 - RNA, 21 nt, Artificial Sequence
  SARM1 targeting guide sequence portion
uucugcggcucacggaggagg

SEQ ID NO: 8328 - RNA, 21 nt, Artificial Sequence
  SARM1 targeting guide sequence portion
uugcgggugaugcccgauuuc

SEQ ID NO: 8329 - RNA, 21 nt, Artificial Sequence
  SARM1 targeting guide sequence portion
uuucaugcccaggucggucug

SEQ ID NO: 8330 - RNA, 22 nt, Artificial Sequence
  SARM1 targeting guide sequence portion
aaaucgggcaucacccgcaaga

SEQ ID NO: 8331 - RNA, 22 nt, Artificial Sequence
  SARM1 targeting guide sequence portion
aacuccagaccgaccugggcau

SEQ ID NO: 8332 - RNA, 22 nt, Artificial Sequence
  SARM1 targeting guide sequence portion
aagcaggucgccauccaccugc

SEQ ID NO: 8333 - RNA, 22 nt, Artificial Sequence
  SARM1 targeting guide sequence portion
aaucgggcaucacccgcaagag

SEQ ID NO: 8334 - RNA, 22 nt, Artificial Sequence
  SARM1 targeting guide sequence portion
accgaccugggcaugaaaucgg

SEQ ID NO: 8335 - RNA, 22 nt, Artificial Sequence
  SARM1 targeting guide sequence portion
accucuugcgggugaugcccga

SEQ ID NO: 8336 - RNA, 22 nt, Artificial Sequence
  SARM1 targeting guide sequence portion
accugcuucugcggcucacgga

SEQ ID NO: 8337 - RNA, 22 nt, Artificial Sequence
  SARM1 targeting guide sequence portion
accugggcaugaaaucgggcau

SEQ ID NO: 8338 - RNA, 22 nt, Artificial Sequence
  SARM1 targeting guide sequence portion
acggaggaggaacuccagaccg

SEQ ID NO: 8339 - RNA, 22 nt, Artificial Sequence
  SARM1 targeting guide sequence portion
acuccagaccgaccugggcaug

SEQ ID NO: 8340 - RNA, 22 nt, Artificial Sequence
  SARM1 targeting guide sequence portion
agaagcaggucgccauccaccu

SEQ ID NO: 8341 - RNA, 22 nt, Artificial Sequence
  SARM1 targeting guide sequence portion
agaccgaccugggcaugaaauc

SEQ ID NO: 8342 - RNA, 22 nt, Artificial Sequence
  SARM1 targeting guide sequence portion
agcagcagguggauggcgaccu

SEQ ID NO: 8343 - RNA, 22 nt, Artificial Sequence
  SARM1 targeting guide sequence portion
agcaggucgccauccaccugcu

SEQ ID NO: 8344 - RNA, 22 nt, Artificial Sequence
  SARM1 targeting guide sequence portion
agcagguggauggcgaccugcu

SEQ ID NO: 8345 - RNA, 22 nt, Artificial Sequence
  SARM1 targeting guide sequence portion
agccgcagaagcaggucgccau

SEQ ID NO: 8346 - RNA, 22 nt, Artificial Sequence
  SARM1 targeting guide sequence portion
aggaacuccagaccgaccuggg

SEQ ID NO: 8347 - RNA, 22 nt, Artificial Sequence
  SARM1 targeting guide sequence portion
aggagcagcagguggauggcga

SEQ ID NO: 8348 - RNA, 22 nt, Artificial Sequence
  SARM1 targeting guide sequence portion
aggaggaacuccagaccgaccu

SEQ ID NO: 8349 - RNA, 22 nt, Artificial Sequence
  SARM1 targeting guide sequence portion
aggucgccauccaccugcugcu

SEQ ID NO: 8350 - RNA, 22 nt, Artificial Sequence
  SARM1 targeting guide sequence portion
aggucggucuggaguuccuccu

SEQ ID NO: 8351 - RNA, 22 nt, Artificial Sequence
  SARM1 targeting guide sequence portion
agguggauggcgaccugcuucu

SEQ ID NO: 8352 - RNA, 22 nt, Artificial Sequence
  SARM1 targeting guide sequence portion
aguuccuccuccgugagccgca

SEQ ID NO: 8353 - RNA, 22 nt, Artificial Sequence
  SARM1 targeting guide sequence portion
aucgggcaucacccgcaagagg

SEQ ID NO: 8354 - RNA, 22 nt, Artificial Sequence
  SARM1 targeting guide sequence portion
augaaaucgggcaucacccgca

SEQ ID NO: 8355 - RNA, 22 nt, Artificial Sequence
  SARM1 targeting guide sequence portion
augcccaggucggucuggaguu

SEQ ID NO: 8356 - RNA, 22 nt, Artificial Sequence
  SARM1 targeting guide sequence portion
augcccgauuucaugcccaggu

SEQ ID NO: 8357 - RNA, 22 nt, Artificial Sequence
  SARM1 targeting guide sequence portion
auggcgaccugcuucugcggcu

SEQ ID NO: 8358 - RNA, 22 nt, Artificial Sequence
  SARM1 targeting guide sequence portion
auuucaugcccaggucggucug

SEQ ID NO: 8359 - RNA, 22 nt, Artificial Sequence
  SARM1 targeting guide sequence portion
cacggaggaggaacuccagacc

SEQ ID NO: 8360 - RNA, 22 nt, Artificial Sequence
  SARM1 targeting guide sequence portion
cagaagcaggucgccauccacc

SEQ ID NO: 8361 - RNA, 22 nt, Artificial Sequence
  SARM1 targeting guide sequence portion
cagaccgaccugggcaugaaau

SEQ ID NO: 8362 - RNA, 22 nt, Artificial Sequence
  SARM1 targeting guide sequence portion
cagcagguggauggcgaccugc

SEQ ID NO: 8363 - RNA, 22 nt, Artificial Sequence
  SARM1 targeting guide sequence portion
caggagcagcagguggauggcg

SEQ ID NO: 8364 - RNA, 22 nt, Artificial Sequence
  SARM1 targeting guide sequence portion
caggucgccauccaccugcugc

SEQ ID NO: 8365 - RNA, 22 nt, Artificial Sequence
  SARM1 targeting guide sequence portion
caggucggucuggaguuccucc

SEQ ID NO: 8366 - RNA, 22 nt, Artificial Sequence
  SARM1 targeting guide sequence portion
cagguggauggcgaccugcuuc

SEQ ID NO: 8367 - RNA, 22 nt, Artificial Sequence
  SARM1 targeting guide sequence portion
caugaaaucgggcaucacccgc

SEQ ID NO: 8368 - RNA, 22 nt, Artificial Sequence
  SARM1 targeting guide sequence portion
caugcccaggucggucuggagu

SEQ ID NO: 8369 - RNA, 22 nt, Artificial Sequence
  SARM1 targeting guide sequence portion
ccagaccgaccugggcaugaaa

SEQ ID NO: 8370 - RNA, 22 nt, Artificial Sequence
  SARM1 targeting guide sequence portion
ccaggagcagcagguggauggc

SEQ ID NO: 8371 - RNA, 22 nt, Artificial Sequence
  SARM1 targeting guide sequence portion
ccaggucggucuggaguuccuc

SEQ ID NO: 8372 - RNA, 22 nt, Artificial Sequence
  SARM1 targeting guide sequence portion
cccaggagcagcagguggaugg

SEQ ID NO: 8373 - RNA, 22 nt, Artificial Sequence
  SARM1 targeting guide sequence portion
cccaggucggucuggaguuccu

SEQ ID NO: 8374 - RNA, 22 nt, Artificial Sequence
  SARM1 targeting guide sequence portion
ccccaggagcagcagguggaug

SEQ ID NO: 8375 - RNA, 22 nt, Artificial Sequence
  SARM1 targeting guide sequence portion
cccccaggagcagcagguggau

SEQ ID NO: 8376 - RNA, 22 nt, Artificial Sequence
  SARM1 targeting guide sequence portion
cccgauuucaugcccaggucgg

SEQ ID NO: 8377 - RNA, 22 nt, Artificial Sequence
  SARM1 targeting guide sequence portion
ccgaccugggcaugaaaucggg

SEQ ID NO: 8378 - RNA, 22 nt, Artificial Sequence
  SARM1 targeting guide sequence portion
ccgauuucaugcccaggucggu

SEQ ID NO: 8379 - RNA, 22 nt, Artificial Sequence
  SARM1 targeting guide sequence portion
ccgcagaagcaggucgccaucc

SEQ ID NO: 8380 - RNA, 22 nt, Artificial Sequence
  SARM1 targeting guide sequence portion
ccguaccucuugcgggugaugc

SEQ ID NO: 8381 - RNA, 22 nt, Artificial Sequence
  SARM1 targeting guide sequence portion
ccgugagccgcagaagcagguc

SEQ ID NO: 8382 - RNA, 22 nt, Artificial Sequence
  SARM1 targeting guide sequence portion
ccuccgugagccgcagaagcag

SEQ ID NO: 8383 - RNA, 22 nt, Artificial Sequence
  SARM1 targeting guide sequence portion
ccuccuccgugagccgcagaag

SEQ ID NO: 8384 - RNA, 22 nt, Artificial Sequence
  SARM1 targeting guide sequence portion
ccucuugcgggugaugcccgau

SEQ ID NO: 8385 - RNA, 22 nt, Artificial Sequence
  SARM1 targeting guide sequence portion
ccugcuucugcggcucacggag

SEQ ID NO: 8386 - RNA, 22 nt, Artificial Sequence
  SARM1 targeting guide sequence portion
ccugggcaugaaaucgggcauc

SEQ ID NO: 8387 - RNA, 22 nt, Artificial Sequence
  SARM1 targeting guide sequence portion
cgaccugcuucugcggcucacg

SEQ ID NO: 8388 - RNA, 22 nt, Artificial Sequence
  SARM1 targeting guide sequence portion
cgaccugggcaugaaaucgggc

SEQ ID NO: 8389 - RNA, 22 nt, Artificial Sequence
  SARM1 targeting guide sequence portion
cgauuucaugcccaggucgguc

SEQ ID NO: 8390 - RNA, 22 nt, Artificial Sequence
  SARM1 targeting guide sequence portion
cgcagaagcaggucgccaucca

SEQ ID NO: 8391 - RNA, 22 nt, Artificial Sequence
  SARM1 targeting guide sequence portion
cggaggaggaacuccagaccga

SEQ ID NO: 8392 - RNA, 22 nt, Artificial Sequence
  SARM1 targeting guide sequence portion
cggcucacggaggaggaacucc

SEQ ID NO: 8393 - RNA, 22 nt, Artificial Sequence
  SARM1 targeting guide sequence portion
cgggugaugcccgauuucaugc

SEQ ID NO: 8394 - RNA, 22 nt, Artificial Sequence
  SARM1 targeting guide sequence portion
cggucuggaguuccuccuccgu

SEQ ID NO: 8395 - RNA, 22 nt, Artificial Sequence
  SARM1 targeting guide sequence portion
cguaccucuugcgggugaugcc

SEQ ID NO: 8396 - RNA, 22 nt, Artificial Sequence
  SARM1 targeting guide sequence portion
cgugagccgcagaagcaggucg

SEQ ID NO: 8397 - RNA, 22 nt, Artificial Sequence
  SARM1 targeting guide sequence portion
cucacggaggaggaacuccaga

SEQ ID NO: 8398 - RNA, 22 nt, Artificial Sequence
  SARM1 targeting guide sequence portion
cuccagaccgaccugggcauga

SEQ ID NO: 8399 - RNA, 22 nt, Artificial Sequence
  SARM1 targeting guide sequence portion
cuccgugagccgcagaagcagg

SEQ ID NO: 8400 - RNA, 22 nt, Artificial Sequence
  SARM1 targeting guide sequence portion
cuccuccgugagccgcagaagc

SEQ ID NO: 8401 - RNA, 22 nt, Artificial Sequence
  SARM1 targeting guide sequence portion
cucuugcgggugaugcccgauu

SEQ ID NO: 8402 - RNA, 22 nt, Artificial Sequence
  SARM1 targeting guide sequence portion
cugcggcucacggaggaggaac

SEQ ID NO: 8403 - RNA, 22 nt, Artificial Sequence
  SARM1 targeting guide sequence portion
cugcuucugcggcucacggagg

SEQ ID NO: 8404 - RNA, 22 nt, Artificial Sequence
  SARM1 targeting guide sequence portion
cuggaguuccuccuccgugagc

SEQ ID NO: 8405 - RNA, 22 nt, Artificial Sequence
  SARM1 targeting guide sequence portion
cugggcaugaaaucgggcauca

SEQ ID NO: 8406 - RNA, 22 nt, Artificial Sequence
  SARM1 targeting guide sequence portion
cuucugcggcucacggaggagg

SEQ ID NO: 8407 - RNA, 22 nt, Artificial Sequence
  SARM1 targeting guide sequence portion
cuugcgggugaugcccgauuuc

SEQ ID NO: 8408 - RNA, 22 nt, Artificial Sequence
  SARM1 targeting guide sequence portion
gaaaucgggcaucacccgcaag

SEQ ID NO: 8409 - RNA, 22 nt, Artificial Sequence
  SARM1 targeting guide sequence portion
gaacuccagaccgaccugggca

SEQ ID NO: 8410 - RNA, 22 nt, Artificial Sequence
  SARM1 targeting guide sequence portion
gaagcaggucgccauccaccug

SEQ ID NO: 8411 - RNA, 22 nt, Artificial Sequence
  SARM1 targeting guide sequence portion
gaccgaccugggcaugaaaucg

SEQ ID NO: 8412 - RNA, 22 nt, Artificial Sequence
  SARM1 targeting guide sequence portion
gaccugcuucugcggcucacgg

SEQ ID NO: 8413 - RNA, 22 nt, Artificial Sequence
  SARM1 targeting guide sequence portion
gaccugggcaugaaaucgggca

SEQ ID NO: 8414 - RNA, 22 nt, Artificial Sequence
  SARM1 targeting guide sequence portion
gagcagcagguggauggcgacc

SEQ ID NO: 8415 - RNA, 22 nt, Artificial Sequence
  SARM1 targeting guide sequence portion
gagccgcagaagcaggucgcca

SEQ ID NO: 8416 - RNA, 22 nt, Artificial Sequence
  SARM1 targeting guide sequence portion
gaggaacuccagaccgaccugg

SEQ ID NO: 8417 - RNA, 22 nt, Artificial Sequence
  SARM1 targeting guide sequence portion
gaggaggaacuccagaccgacc

SEQ ID NO: 8418 - RNA, 22 nt, Artificial Sequence
  SARM1 targeting guide sequence portion
gaguuccuccuccgugagccgc

SEQ ID NO: 8419 - RNA, 22 nt, Artificial Sequence
  SARM1 targeting guide sequence portion
gaugcccgauuucaugcccagg

SEQ ID NO: 8420 - RNA, 22 nt, Artificial Sequence
  SARM1 targeting guide sequence portion
gauggcgaccugcuucugcggc

SEQ ID NO: 8421 - RNA, 22 nt, Artificial Sequence
  SARM1 targeting guide sequence portion
gauuucaugcccaggucggucu

SEQ ID NO: 8422 - RNA, 22 nt, Artificial Sequence
  SARM1 targeting guide sequence portion
gcagaagcaggucgccauccac

SEQ ID NO: 8423 - RNA, 22 nt, Artificial Sequence
  SARM1 targeting guide sequence portion
gcagcagguggauggcgaccug

SEQ ID NO: 8424 - RNA, 22 nt, Artificial Sequence
  SARM1 targeting guide sequence portion
gcaggucgccauccaccugcug

SEQ ID NO: 8425 - RNA, 22 nt, Artificial Sequence
  SARM1 targeting guide sequence portion
gcagguggauggcgaccugcuu

SEQ ID NO: 8426 - RNA, 22 nt, Artificial Sequence
  SARM1 targeting guide sequence portion
gcaugaaaucgggcaucacccg

SEQ ID NO: 8427 - RNA, 22 nt, Artificial Sequence
  SARM1 targeting guide sequence portion
gcccaggucggucuggaguucc

SEQ ID NO: 8428 - RNA, 22 nt, Artificial Sequence
  SARM1 targeting guide sequence portion
gcccgauuucaugcccaggucg

SEQ ID NO: 8429 - RNA, 22 nt, Artificial Sequence
  SARM1 targeting guide sequence portion
gccgcagaagcaggucgccauc

SEQ ID NO: 8430 - RNA, 22 nt, Artificial Sequence
  SARM1 targeting guide sequence portion
gcgaccugcuucugcggcucac

SEQ ID NO: 8431 - RNA, 22 nt, Artificial Sequence
  SARM1 targeting guide sequence portion
gcggcucacggaggaggaacuc

SEQ ID NO: 8432 - RNA, 22 nt, Artificial Sequence
  SARM1 targeting guide sequence portion
gcgggugaugcccgauuucaug

SEQ ID NO: 8433 - RNA, 22 nt, Artificial Sequence
  SARM1 targeting guide sequence portion
gcucacggaggaggaacuccag

SEQ ID NO: 8434 - RNA, 22 nt, Artificial Sequence
  SARM1 targeting guide sequence portion
gcuucugcggcucacggaggag

SEQ ID NO: 8435 - RNA, 22 nt, Artificial Sequence
  SARM1 targeting guide sequence portion
ggaacuccagaccgaccugggc

SEQ ID NO: 8436 - RNA, 22 nt, Artificial Sequence
  SARM1 targeting guide sequence portion
ggagcagcagguggauggcgac

SEQ ID NO: 8437 - RNA, 22 nt, Artificial Sequence
  SARM1 targeting guide sequence portion
ggaggaacuccagaccgaccug

SEQ ID NO: 8438 - RNA, 22 nt, Artificial Sequence
  SARM1 targeting guide sequence portion
ggaggaggaacuccagaccgac

SEQ ID NO: 8439 - RNA, 22 nt, Artificial Sequence
  SARM1 targeting guide sequence portion
ggaguuccuccuccgugagccg

SEQ ID NO: 8440 - RNA, 22 nt, Artificial Sequence
  SARM1 targeting guide sequence portion
ggauggcgaccugcuucugcgg

SEQ ID NO: 8441 - RNA, 22 nt, Artificial Sequence
  SARM1 targeting guide sequence portion
ggcaugaaaucgggcaucaccc

SEQ ID NO: 8442 - RNA, 22 nt, Artificial Sequence
  SARM1 targeting guide sequence portion
ggcgaccugcuucugcggcuca

SEQ ID NO: 8443 - RNA, 22 nt, Artificial Sequence
  SARM1 targeting guide sequence portion
ggcucacggaggaggaacucca

SEQ ID NO: 8444 - RNA, 22 nt, Artificial Sequence
  SARM1 targeting guide sequence portion
gggcaugaaaucgggcaucacc

SEQ ID NO: 8445 - RNA, 22 nt, Artificial Sequence
  SARM1 targeting guide sequence portion
gggugaugcccgauuucaugcc

SEQ ID NO: 8446 - RNA, 22 nt, Artificial Sequence
  SARM1 targeting guide sequence portion
ggucgccauccaccugcugcuc

SEQ ID NO: 8447 - RNA, 22 nt, Artificial Sequence
  SARM1 targeting guide sequence portion
ggucggucuggaguuccuccuc

SEQ ID NO: 8448 - RNA, 22 nt, Artificial Sequence
  SARM1 targeting guide sequence portion
ggucuggaguuccuccuccgug

SEQ ID NO: 8449 - RNA, 22 nt, Artificial Sequence
  SARM1 targeting guide sequence portion
ggugaugcccgauuucaugccc

SEQ ID NO: 8450 - RNA, 22 nt, Artificial Sequence
  SARM1 targeting guide sequence portion
gguggauggcgaccugcuucug

SEQ ID NO: 8451 - RNA, 22 nt, Artificial Sequence
  SARM1 targeting guide sequence portion
guaccucuugcgggugaugccc

SEQ ID NO: 8452 - RNA, 22 nt, Artificial Sequence
  SARM1 targeting guide sequence portion
gucgccauccaccugcugcucc

SEQ ID NO: 8453 - RNA, 22 nt, Artificial Sequence
  SARM1 targeting guide sequence portion
gucggucuggaguuccuccucc

SEQ ID NO: 8454 - RNA, 22 nt, Artificial Sequence
  SARM1 targeting guide sequence portion
gucuggaguuccuccuccguga

SEQ ID NO: 8455 - RNA, 22 nt, Artificial Sequence
  SARM1 targeting guide sequence portion
gugagccgcagaagcaggucgc

SEQ ID NO: 8456 - RNA, 22 nt, Artificial Sequence
  SARM1 targeting guide sequence portion
gugaugcccgauuucaugccca

SEQ ID NO: 8457 - RNA, 22 nt, Artificial Sequence
  SARM1 targeting guide sequence portion
guggauggcgaccugcuucugc

SEQ ID NO: 8458 - RNA, 22 nt, Artificial Sequence
  SARM1 targeting guide sequence portion
guuccuccuccgugagccgcag

SEQ ID NO: 8459 - RNA, 22 nt, Artificial Sequence
  SARM1 targeting guide sequence portion
uaccucuugcgggugaugcccg

SEQ ID NO: 8460 - RNA, 22 nt, Artificial Sequence
  SARM1 targeting guide sequence portion
ucacggaggaggaacuccagac

SEQ ID NO: 8461 - RNA, 22 nt, Artificial Sequence
  SARM1 targeting guide sequence portion
ucaugcccaggucggucuggag

SEQ ID NO: 8462 - RNA, 22 nt, Artificial Sequence
  SARM1 targeting guide sequence portion
uccagaccgaccugggcaugaa

SEQ ID NO: 8463 - RNA, 22 nt, Artificial Sequence
  SARM1 targeting guide sequence portion
uccguaccucuugcgggugaug

SEQ ID NO: 8464 - RNA, 22 nt, Artificial Sequence
  SARM1 targeting guide sequence portion
uccgugagccgcagaagcaggu

SEQ ID NO: 8465 - RNA, 22 nt, Artificial Sequence
  SARM1 targeting guide sequence portion
uccuccgugagccgcagaagca

SEQ ID NO: 8466 - RNA, 22 nt, Artificial Sequence
  SARM1 targeting guide sequence portion
uccuccuccgugagccgcagaa

SEQ ID NO: 8467 - RNA, 22 nt, Artificial Sequence
  SARM1 targeting guide sequence portion
ucggucuggaguuccuccuccg

SEQ ID NO: 8468 - RNA, 22 nt, Artificial Sequence
  SARM1 targeting guide sequence portion
ucugcggcucacggaggaggaa

SEQ ID NO: 8469 - RNA, 22 nt, Artificial Sequence
  SARM1 targeting guide sequence portion
ucuggaguuccuccuccgugag

SEQ ID NO: 8470 - RNA, 22 nt, Artificial Sequence
  SARM1 targeting guide sequence portion
ucuugcgggugaugcccgauuu

SEQ ID NO: 8471 - RNA, 22 nt, Artificial Sequence
  SARM1 targeting guide sequence portion
ugaaaucgggcaucacccgcaa

SEQ ID NO: 8472 - RNA, 22 nt, Artificial Sequence
  SARM1 targeting guide sequence portion
ugagccgcagaagcaggucgcc

SEQ ID NO: 8473 - RNA, 22 nt, Artificial Sequence
  SARM1 targeting guide sequence portion
ugaugcccgauuucaugcccag

SEQ ID NO: 8474 - RNA, 22 nt, Artificial Sequence
  SARM1 targeting guide sequence portion
ugcccaggucggucuggaguuc

SEQ ID NO: 8475 - RNA, 22 nt, Artificial Sequence
  SARM1 targeting guide sequence portion
ugcccgauuucaugcccagguc

SEQ ID NO: 8476 - RNA, 22 nt, Artificial Sequence
  SARM1 targeting guide sequence portion
ugcggcucacggaggaggaacu

SEQ ID NO: 8477 - RNA, 22 nt, Artificial Sequence
  SARM1 targeting guide sequence portion
ugcgggugaugcccgauuucau

SEQ ID NO: 8478 - RNA, 22 nt, Artificial Sequence
  SARM1 targeting guide sequence portion
ugcuucugcggcucacggagga

SEQ ID NO: 8479 - RNA, 22 nt, Artificial Sequence
  SARM1 targeting guide sequence portion
uggaguuccuccuccgugagcc

SEQ ID NO: 8480 - RNA, 22 nt, Artificial Sequence
  SARM1 targeting guide sequence portion
uggauggcgaccugcuucugcg

SEQ ID NO: 8481 - RNA, 22 nt, Artificial Sequence
  SARM1 targeting guide sequence portion
uggcgaccugcuucugcggcuc

SEQ ID NO: 8482 - RNA, 22 nt, Artificial Sequence
  SARM1 targeting guide sequence portion
ugggcaugaaaucgggcaucac

SEQ ID NO: 8483 - RNA, 22 nt, Artificial Sequence
  SARM1 targeting guide sequence portion
uucaugcccaggucggucugga

SEQ ID NO: 8484 - RNA, 22 nt, Artificial Sequence
  SARM1 targeting guide sequence portion
uuccuccuccgugagccgcaga

SEQ ID NO: 8485 - RNA, 22 nt, Artificial Sequence
  SARM1 targeting guide sequence portion
uucugcggcucacggaggagga

SEQ ID NO: 8486 - RNA, 22 nt, Artificial Sequence
  SARM1 targeting guide sequence portion
uugcgggugaugcccgauuuca

SEQ ID NO: 8487 - RNA, 22 nt, Artificial Sequence
  SARM1 targeting guide sequence portion
uuucaugcccaggucggucugg

SEQ ID NO: 8488 - RNA, 20 nt, Artificial Sequence
  SARM1 targeting guide sequence portion
aaccuggcggacuggcuggg

SEQ ID NO: 8489 - RNA, 20 nt, Artificial Sequence
  SARM1 targeting guide sequence portion
aacuauucuacgugcgaccg

SEQ ID NO: 8490 - RNA, 20 nt, Artificial Sequence
  SARM1 targeting guide sequence portion
aagaccuucgccaacuauuc

SEQ ID NO: 8491 - RNA, 20 nt, Artificial Sequence
  SARM1 targeting guide sequence portion
aagacugcggcauccaccug

SEQ ID NO: 8492 - RNA, 20 nt, Artificial Sequence
  SARM1 targeting guide sequence portion
aagcgcggguccaggcugcc

SEQ ID NO: 8493 - RNA, 20 nt, Artificial Sequence
  SARM1 targeting guide sequence portion
aaggucuugagcuccgugag

SEQ ID NO: 8494 - RNA, 20 nt, Artificial Sequence
  SARM1 targeting guide sequence portion
aauaguuggcgaaggucuug

SEQ ID NO: 8495 - RNA, 20 nt, Artificial Sequence
  SARM1 targeting guide sequence portion
acaccuacggccuggucagc

SEQ ID NO: 8496 - RNA, 20 nt, Artificial Sequence
  SARM1 targeting guide sequence portion
acacgcggugcagcagggag

SEQ ID NO: 8497 - RNA, 20 nt, Artificial Sequence
  SARM1 targeting guide sequence portion
accaggccguagguguacug

SEQ ID NO: 8498 - RNA, 20 nt, Artificial Sequence
  SARM1 targeting guide sequence portion
acccgcgcuuccgccaguac

SEQ ID NO: 8499 - RNA, 20 nt, Artificial Sequence
  SARM1 targeting guide sequence portion
accgcagcaaccuggcggac

SEQ ID NO: 8500 - RNA, 20 nt, Artificial Sequence
  SARM1 targeting guide sequence portion
accgcgcccgcauccucacg

SEQ ID NO: 8501 - RNA, 20 nt, Artificial Sequence
  SARM1 targeting guide sequence portion
accgcgugucugagcagcag

SEQ ID NO: 8502 - RNA, 20 nt, Artificial Sequence
  SARM1 targeting guide sequence portion
accgcucccugcugcaccgc

SEQ ID NO: 8503 - RNA, 20 nt, Artificial Sequence
  SARM1 targeting guide sequence portion
accuacggccuggucagcug

SEQ ID NO: 8504 - RNA, 20 nt, Artificial Sequence
  SARM1 targeting guide sequence portion
accucuggccgccgugagga

SEQ ID NO: 8505 - RNA, 20 nt, Artificial Sequence
  SARM1 targeting guide sequence portion
accuggcggacuggcugggc

SEQ ID NO: 8506 - RNA, 20 nt, Artificial Sequence
  SARM1 targeting guide sequence portion
accugggcgugcaccgcgcc

SEQ ID NO: 8507 - RNA, 20 nt, Artificial Sequence
  SARM1 targeting guide sequence portion
accuucgccaacuauucuac

SEQ ID NO: 8508 - RNA, 20 nt, Artificial Sequence
  SARM1 targeting guide sequence portion
acgcccagguggaugccgca

SEQ ID NO: 8509 - RNA, 20 nt, Artificial Sequence
  SARM1 targeting guide sequence portion
acgcggugcagcagggagcg

SEQ ID NO: 8510 - RNA, 20 nt, Artificial Sequence
  SARM1 targeting guide sequence portion
acggagcucaagaccuucgc

SEQ ID NO: 8511 - RNA, 20 nt, Artificial Sequence
  SARM1 targeting guide sequence portion
acggccuggucagcugcggc

SEQ ID NO: 8512 - RNA, 20 nt, Artificial Sequence
  SARM1 targeting guide sequence portion
acguagaauaguuggcgaag

SEQ ID NO: 8513 - RNA, 20 nt, Artificial Sequence
  SARM1 targeting guide sequence portion
acgugcgaccgcagcaaccu

SEQ ID NO: 8514 - RNA, 20 nt, Artificial Sequence
  SARM1 targeting guide sequence portion
acuauucuacgugcgaccgc

SEQ ID NO: 8515 - RNA, 20 nt, Artificial Sequence
  SARM1 targeting guide sequence portion
acugcggcauccaccugggc

SEQ ID NO: 8516 - RNA, 20 nt, Artificial Sequence
  SARM1 targeting guide sequence portion
acuggcggaagcgcgggucc

SEQ ID NO: 8517 - RNA, 20 nt, Artificial Sequence
  SARM1 targeting guide sequence portion
acuggcugggcagccuggac

SEQ ID NO: 8518 - RNA, 20 nt, Artificial Sequence
  SARM1 targeting guide sequence portion
agaauaguuggcgaaggucu

SEQ ID NO: 8519 - RNA, 20 nt, Artificial Sequence
  SARM1 targeting guide sequence portion
agacacgcggugcagcaggg

SEQ ID NO: 8520 - RNA, 20 nt, Artificial Sequence
  SARM1 targeting guide sequence portion
agaccuucgccaacuauucu

SEQ ID NO: 8521 - RNA, 20 nt, Artificial Sequence
  SARM1 targeting guide sequence portion
agacugcggcauccaccugg

SEQ ID NO: 8522 - RNA, 20 nt, Artificial Sequence
  SARM1 targeting guide sequence portion
agcaaccuggcggacuggcu

SEQ ID NO: 8523 - RNA, 20 nt, Artificial Sequence
  SARM1 targeting guide sequence portion
agcagcagcugcuggaagac

SEQ ID NO: 8524 - RNA, 20 nt, Artificial Sequence
  SARM1 targeting guide sequence portion
agcagcugcugcucagacac

SEQ ID NO: 8525 - RNA, 20 nt, Artificial Sequence
  SARM1 targeting guide sequence portion
agcagcugcuggaagacugc

SEQ ID NO: 8526 - RNA, 20 nt, Artificial Sequence
  SARM1 targeting guide sequence portion
agcagggagcgguccaggcc

SEQ ID NO: 8527 - RNA, 20 nt, Artificial Sequence
  SARM1 targeting guide sequence portion
agccaguccgccagguugcu

SEQ ID NO: 8528 - RNA, 20 nt, Artificial Sequence
  SARM1 targeting guide sequence portion
agccuggacccgcgcuuccg

SEQ ID NO: 8529 - RNA, 20 nt, Artificial Sequence
  SARM1 targeting guide sequence portion
agcgcggguccaggcugccc

SEQ ID NO: 8530 - RNA, 20 nt, Artificial Sequence
  SARM1 targeting guide sequence portion
agcgguccaggccgcagcug

SEQ ID NO: 8531 - RNA, 20 nt, Artificial Sequence
  SARM1 targeting guide sequence portion
agcucaagaccuucgccaac

SEQ ID NO: 8532 - RNA, 20 nt, Artificial Sequence
  SARM1 targeting guide sequence portion
agcucacggagcucaagacc

SEQ ID NO: 8533 - RNA, 20 nt, Artificial Sequence
  SARM1 targeting guide sequence portion
agcuccgugagcucccuaaa

SEQ ID NO: 8534 - RNA, 20 nt, Artificial Sequence
  SARM1 targeting guide sequence portion
agcugaccaggccguaggug

SEQ ID NO: 8535 - RNA, 20 nt, Artificial Sequence
  SARM1 targeting guide sequence portion
agcugcggccuggaccgcuc

SEQ ID NO: 8536 - RNA, 20 nt, Artificial Sequence
  SARM1 targeting guide sequence portion
agcugcugcucagacacgcg

SEQ ID NO: 8537 - RNA, 20 nt, Artificial Sequence
  SARM1 targeting guide sequence portion
agcugcuggaagacugcggc

SEQ ID NO: 8538 - RNA, 20 nt, Artificial Sequence
  SARM1 targeting guide sequence portion
aggaugcgggcgcggugcac

SEQ ID NO: 8539 - RNA, 20 nt, Artificial Sequence
  SARM1 targeting guide sequence portion
aggccgcagcugaccaggcc

SEQ ID NO: 8540 - RNA, 20 nt, Artificial Sequence
  SARM1 targeting guide sequence portion
aggccguagguguacuggcg

SEQ ID NO: 8541 - RNA, 20 nt, Artificial Sequence
  SARM1 targeting guide sequence portion
aggcugcccagccaguccgc

SEQ ID NO: 8542 - RNA, 20 nt, Artificial Sequence
  SARM1 targeting guide sequence portion
agggagcgguccaggccgca

SEQ ID NO: 8543 - RNA, 20 nt, Artificial Sequence
  SARM1 targeting guide sequence portion
agggagcucacggagcucaa

SEQ ID NO: 8544 - RNA, 20 nt, Artificial Sequence
  SARM1 targeting guide sequence portion
aggucuugagcuccgugagc

SEQ ID NO: 8545 - RNA, 20 nt, Artificial Sequence
  SARM1 targeting guide sequence portion
agguggaugccgcagucuuc

SEQ ID NO: 8546 - RNA, 20 nt, Artificial Sequence
  SARM1 targeting guide sequence portion
agguguacuggcggaagcgc

SEQ ID NO: 8547 - RNA, 20 nt, Artificial Sequence
  SARM1 targeting guide sequence portion
agguucuuuagggagcucac

SEQ ID NO: 8548 - RNA, 20 nt, Artificial Sequence
  SARM1 targeting guide sequence portion
agguugcugcggucgcacgu

SEQ ID NO: 8549 - RNA, 20 nt, Artificial Sequence
  SARM1 targeting guide sequence portion
aguacaccuacggccugguc

SEQ ID NO: 8550 - RNA, 20 nt, Artificial Sequence
  SARM1 targeting guide sequence portion
aguccgccagguugcugcgg

SEQ ID NO: 8551 - RNA, 20 nt, Artificial Sequence
  SARM1 targeting guide sequence portion
agucuuccagcagcugcugc

SEQ ID NO: 8552 - RNA, 20 nt, Artificial Sequence
  SARM1 targeting guide sequence portion
aguuggcgaaggucuugagc

SEQ ID NO: 8553 - RNA, 20 nt, Artificial Sequence
  SARM1 targeting guide sequence portion
auaguuggcgaaggucuuga

SEQ ID NO: 8554 - RNA, 20 nt, Artificial Sequence
  SARM1 targeting guide sequence portion
auccaccugggcgugcaccg

SEQ ID NO: 8555 - RNA, 20 nt, Artificial Sequence
  SARM1 targeting guide sequence portion
auccucacggcggccagagg

SEQ ID NO: 8556 - RNA, 20 nt, Artificial Sequence
  SARM1 targeting guide sequence portion
augccgcagucuuccagcag

SEQ ID NO: 8557 - RNA, 20 nt, Artificial Sequence
  SARM1 targeting guide sequence portion
augcgggcgcggugcacgcc

SEQ ID NO: 8558 - RNA, 20 nt, Artificial Sequence
  SARM1 targeting guide sequence portion
auucuacgugcgaccgcagc

SEQ ID NO: 8559 - RNA, 20 nt, Artificial Sequence
  SARM1 targeting guide sequence portion
caaccuggcggacuggcugg

SEQ ID NO: 8560 - RNA, 20 nt, Artificial Sequence
  SARM1 targeting guide sequence portion
caacuauucuacgugcgacc

SEQ ID NO: 8561 - RNA, 20 nt, Artificial Sequence
  SARM1 targeting guide sequence portion
caagaccuucgccaacuauu

SEQ ID NO: 8562 - RNA, 20 nt, Artificial Sequence
  SARM1 targeting guide sequence portion
caccgcgcccgcauccucac

SEQ ID NO: 8563 - RNA, 20 nt, Artificial Sequence
  SARM1 targeting guide sequence portion
caccgcgugucugagcagca

SEQ ID NO: 8564 - RNA, 20 nt, Artificial Sequence
  SARM1 targeting guide sequence portion
caccuacggccuggucagcu

SEQ ID NO: 8565 - RNA, 20 nt, Artificial Sequence
  SARM1 targeting guide sequence portion
caccugggcgugcaccgcgc

SEQ ID NO: 8566 - RNA, 20 nt, Artificial Sequence
  SARM1 targeting guide sequence portion
cacgcccagguggaugccgc

SEQ ID NO: 8567 - RNA, 20 nt, Artificial Sequence
  SARM1 targeting guide sequence portion
cacgcggugcagcagggagc

SEQ ID NO: 8568 - RNA, 20 nt, Artificial Sequence
  SARM1 targeting guide sequence portion
cacggagcucaagaccuucg

SEQ ID NO: 8569 - RNA, 20 nt, Artificial Sequence
  SARM1 targeting guide sequence portion
cacguagaauaguuggcgaa

SEQ ID NO: 8570 - RNA, 20 nt, Artificial Sequence
  SARM1 targeting guide sequence portion
cagacacgcggugcagcagg

SEQ ID NO: 8571 - RNA, 20 nt, Artificial Sequence
  SARM1 targeting guide sequence portion
cagcaaccuggcggacuggc

SEQ ID NO: 8572 - RNA, 20 nt, Artificial Sequence
  SARM1 targeting guide sequence portion
cagcagcugcugcucagaca

SEQ ID NO: 8573 - RNA, 20 nt, Artificial Sequence
  SARM1 targeting guide sequence portion
cagcagcugcuggaagacug

SEQ ID NO: 8574 - RNA, 20 nt, Artificial Sequence
  SARM1 targeting guide sequence portion
cagcagggagcgguccaggc

SEQ ID NO: 8575 - RNA, 20 nt, Artificial Sequence
  SARM1 targeting guide sequence portion
cagccaguccgccagguugc

SEQ ID NO: 8576 - RNA, 20 nt, Artificial Sequence
  SARM1 targeting guide sequence portion
cagccuggacccgcgcuucc

SEQ ID NO: 8577 - RNA, 20 nt, Artificial Sequence
  SARM1 targeting guide sequence portion
cagcugaccaggccguaggu

SEQ ID NO: 8578 - RNA, 20 nt, Artificial Sequence
  SARM1 targeting guide sequence portion
cagcugcggccuggaccgcu

SEQ ID NO: 8579 - RNA, 20 nt, Artificial Sequence
  SARM1 targeting guide sequence portion
cagcugcugcucagacacgc

SEQ ID NO: 8580 - RNA, 20 nt, Artificial Sequence
  SARM1 targeting guide sequence portion
cagcugcuggaagacugcgg

SEQ ID NO: 8581 - RNA, 20 nt, Artificial Sequence
  SARM1 targeting guide sequence portion
caggccgcagcugaccaggc

SEQ ID NO: 8582 - RNA, 20 nt, Artificial Sequence
  SARM1 targeting guide sequence portion
caggccguagguguacuggc

SEQ ID NO: 8583 - RNA, 20 nt, Artificial Sequence
  SARM1 targeting guide sequence portion
caggcugcccagccaguccg

SEQ ID NO: 8584 - RNA, 20 nt, Artificial Sequence
  SARM1 targeting guide sequence portion
cagggagcgguccaggccgc

SEQ ID NO: 8585 - RNA, 20 nt, Artificial Sequence
  SARM1 targeting guide sequence portion
cagguggaugccgcagucuu

SEQ ID NO: 8586 - RNA, 20 nt, Artificial Sequence
  SARM1 targeting guide sequence portion
cagguucuuuagggagcuca

SEQ ID NO: 8587 - RNA, 20 nt, Artificial Sequence
  SARM1 targeting guide sequence portion
cagguugcugcggucgcacg

SEQ ID NO: 8588 - RNA, 20 nt, Artificial Sequence
  SARM1 targeting guide sequence portion
caguacaccuacggccuggu

SEQ ID NO: 8589 - RNA, 20 nt, Artificial Sequence
  SARM1 targeting guide sequence portion
caguccgccagguugcugcg

SEQ ID NO: 8590 - RNA, 20 nt, Artificial Sequence
  SARM1 targeting guide sequence portion
cagucuuccagcagcugcug

SEQ ID NO: 8591 - RNA, 20 nt, Artificial Sequence
  SARM1 targeting guide sequence portion
cauccaccugggcgugcacc

SEQ ID NO: 8592 - RNA, 20 nt, Artificial Sequence
  SARM1 targeting guide sequence portion
cauccucacggcggccagag

SEQ ID NO: 8593 - RNA, 20 nt, Artificial Sequence
  SARM1 targeting guide sequence portion
ccaacuauucuacgugcgac

SEQ ID NO: 8594 - RNA, 20 nt, Artificial Sequence
  SARM1 targeting guide sequence portion
ccaccugggcgugcaccgcg

SEQ ID NO: 8595 - RNA, 20 nt, Artificial Sequence
  SARM1 targeting guide sequence portion
ccagcagcugcugcucagac

SEQ ID NO: 8596 - RNA, 20 nt, Artificial Sequence
  SARM1 targeting guide sequence portion
ccagccaguccgccagguug

SEQ ID NO: 8597 - RNA, 20 nt, Artificial Sequence
  SARM1 targeting guide sequence portion
ccaggccgcagcugaccagg

SEQ ID NO: 8598 - RNA, 20 nt, Artificial Sequence
  SARM1 targeting guide sequence portion
ccaggccguagguguacugg

SEQ ID NO: 8599 - RNA, 20 nt, Artificial Sequence
  SARM1 targeting guide sequence portion
ccaggcugcccagccagucc

SEQ ID NO: 8600 - RNA, 20 nt, Artificial Sequence
  SARM1 targeting guide sequence portion
ccagguggaugccgcagucu

SEQ ID NO: 8601 - RNA, 20 nt, Artificial Sequence
  SARM1 targeting guide sequence portion
ccagguugcugcggucgcac

SEQ ID NO: 8602 - RNA, 20 nt, Artificial Sequence
  SARM1 targeting guide sequence portion
ccaguacaccuacggccugg

SEQ ID NO: 8603 - RNA, 20 nt, Artificial Sequence
  SARM1 targeting guide sequence portion
ccaguccgccagguugcugc

SEQ ID NO: 8604 - RNA, 20 nt, Artificial Sequence
  SARM1 targeting guide sequence portion
cccagccaguccgccagguu

SEQ ID NO: 8605 - RNA, 20 nt, Artificial Sequence
  SARM1 targeting guide sequence portion
cccagguggaugccgcaguc

SEQ ID NO: 8606 - RNA, 20 nt, Artificial Sequence
  SARM1 targeting guide sequence portion
cccgcauccucacggcggcc

SEQ ID NO: 8607 - RNA, 20 nt, Artificial Sequence
  SARM1 targeting guide sequence portion
cccgcgcuuccgccaguaca

SEQ ID NO: 8608 - RNA, 20 nt, Artificial Sequence
  SARM1 targeting guide sequence portion
cccugcugcaccgcgugucu

SEQ ID NO: 8609 - RNA, 20 nt, Artificial Sequence
  SARM1 targeting guide sequence portion
ccgcagcaaccuggcggacu

SEQ ID NO: 8610 - RNA, 20 nt, Artificial Sequence
  SARM1 targeting guide sequence portion
ccgcagcugaccaggccgua

SEQ ID NO: 8611 - RNA, 20 nt, Artificial Sequence
  SARM1 targeting guide sequence portion
ccgcagucuuccagcagcug

SEQ ID NO: 8612 - RNA, 20 nt, Artificial Sequence
  SARM1 targeting guide sequence portion
ccgcauccucacggcggcca

SEQ ID NO: 8613 - RNA, 20 nt, Artificial Sequence
  SARM1 targeting guide sequence portion
ccgccagguugcugcggucg

SEQ ID NO: 8614 - RNA, 20 nt, Artificial Sequence
  SARM1 targeting guide sequence portion
ccgccaguacaccuacggcc

SEQ ID NO: 8615 - RNA, 20 nt, Artificial Sequence
  SARM1 targeting guide sequence portion
ccgccgugaggaugcgggcg

SEQ ID NO: 8616 - RNA, 20 nt, Artificial Sequence
  SARM1 targeting guide sequence portion
ccgcgcccgcauccucacgg

SEQ ID NO: 8617 - RNA, 20 nt, Artificial Sequence
  SARM1 targeting guide sequence portion
ccgcgcuuccgccaguacac

SEQ ID NO: 8618 - RNA, 20 nt, Artificial Sequence
  SARM1 targeting guide sequence portion
ccgcgugucugagcagcagc

SEQ ID NO: 8619 - RNA, 20 nt, Artificial Sequence
  SARM1 targeting guide sequence portion
ccgcucccugcugcaccgcg

SEQ ID NO: 8620 - RNA, 20 nt, Artificial Sequence
  SARM1 targeting guide sequence portion
ccguagguguacuggcggaa

SEQ ID NO: 8621 - RNA, 20 nt, Artificial Sequence
  SARM1 targeting guide sequence portion
ccgugagcucccuaaagaac

SEQ ID NO: 8622 - RNA, 20 nt, Artificial Sequence
  SARM1 targeting guide sequence portion
ccgugaggaugcgggcgcgg

SEQ ID NO: 8623 - RNA, 20 nt, Artificial Sequence
  SARM1 targeting guide sequence portion
ccuacggccuggucagcugc

SEQ ID NO: 8624 - RNA, 20 nt, Artificial Sequence
  SARM1 targeting guide sequence portion
ccucuggccgccgugaggau

SEQ ID NO: 8625 - RNA, 20 nt, Artificial Sequence
  SARM1 targeting guide sequence portion
ccugcugcaccgcgugucug

SEQ ID NO: 8626 - RNA, 20 nt, Artificial Sequence
  SARM1 targeting guide sequence portion
ccuggacccgcgcuuccgcc

SEQ ID NO: 8627 - RNA, 20 nt, Artificial Sequence
  SARM1 targeting guide sequence portion
ccuggaccgcucccugcugc

SEQ ID NO: 8628 - RNA, 20 nt, Artificial Sequence
  SARM1 targeting guide sequence portion
ccuggcggacuggcugggca

SEQ ID NO: 8629 - RNA, 20 nt, Artificial Sequence
  SARM1 targeting guide sequence portion
ccugggcgugcaccgcgccc

SEQ ID NO: 8630 - RNA, 20 nt, Artificial Sequence
  SARM1 targeting guide sequence portion
ccuggucagcugcggccugg

SEQ ID NO: 8631 - RNA, 20 nt, Artificial Sequence
  SARM1 targeting guide sequence portion
ccuucgccaacuauucuacg

SEQ ID NO: 8632 - RNA, 20 nt, Artificial Sequence
  SARM1 targeting guide sequence portion
cgaaggucuugagcuccgug

SEQ ID NO: 8633 - RNA, 20 nt, Artificial Sequence
  SARM1 targeting guide sequence portion
cgaccgcagcaaccuggcgg

SEQ ID NO: 8634 - RNA, 20 nt, Artificial Sequence
  SARM1 targeting guide sequence portion
cgcacguagaauaguuggcg

SEQ ID NO: 8635 - RNA, 20 nt, Artificial Sequence
  SARM1 targeting guide sequence portion
cgcagcaaccuggcggacug

SEQ ID NO: 8636 - RNA, 20 nt, Artificial Sequence
  SARM1 targeting guide sequence portion
cgcagcugaccaggccguag

SEQ ID NO: 8637 - RNA, 20 nt, Artificial Sequence
  SARM1 targeting guide sequence portion
cgcagucuuccagcagcugc

SEQ ID NO: 8638 - RNA, 20 nt, Artificial Sequence
  SARM1 targeting guide sequence portion
cgcauccucacggcggccag

SEQ ID NO: 8639 - RNA, 20 nt, Artificial Sequence
  SARM1 targeting guide sequence portion
cgccaacuauucuacgugcg

SEQ ID NO: 8640 - RNA, 20 nt, Artificial Sequence
  SARM1 targeting guide sequence portion
cgccagguugcugcggucgc

SEQ ID NO: 8641 - RNA, 20 nt, Artificial Sequence
  SARM1 targeting guide sequence portion
cgccaguacaccuacggccu

SEQ ID NO: 8642 - RNA, 20 nt, Artificial Sequence
  SARM1 targeting guide sequence portion
cgcccagguggaugccgcag

SEQ ID NO: 8643 - RNA, 20 nt, Artificial Sequence
  SARM1 targeting guide sequence portion
cgcccgcauccucacggcgg

SEQ ID NO: 8644 - RNA, 20 nt, Artificial Sequence
  SARM1 targeting guide sequence portion
cgccgugaggaugcgggcgc

SEQ ID NO: 8645 - RNA, 20 nt, Artificial Sequence
  SARM1 targeting guide sequence portion
cgcgcccgcauccucacggc

SEQ ID NO: 8646 - RNA, 20 nt, Artificial Sequence
  SARM1 targeting guide sequence portion
cgcgcuuccgccaguacacc

SEQ ID NO: 8647 - RNA, 20 nt, Artificial Sequence
  SARM1 targeting guide sequence portion
cgcggguccaggcugcccag

SEQ ID NO: 8648 - RNA, 20 nt, Artificial Sequence
  SARM1 targeting guide sequence portion
cgcggugcacgcccaggugg

SEQ ID NO: 8649 - RNA, 20 nt, Artificial Sequence
  SARM1 targeting guide sequence portion
cgcggugcagcagggagcgg

SEQ ID NO: 8650 - RNA, 20 nt, Artificial Sequence
  SARM1 targeting guide sequence portion
cgcgugucugagcagcagcu

SEQ ID NO: 8651 - RNA, 20 nt, Artificial Sequence
  SARM1 targeting guide sequence portion
cgcucccugcugcaccgcgu

SEQ ID NO: 8652 - RNA, 20 nt, Artificial Sequence
  SARM1 targeting guide sequence portion
cgcuuccgccaguacaccua

SEQ ID NO: 8653 - RNA, 20 nt, Artificial Sequence
  SARM1 targeting guide sequence portion
cggaagcgcggguccaggcu

SEQ ID NO: 8654 - RNA, 20 nt, Artificial Sequence
  SARM1 targeting guide sequence portion
cggacuggcugggcagccug

SEQ ID NO: 8655 - RNA, 20 nt, Artificial Sequence
  SARM1 targeting guide sequence portion
cggagcucaagaccuucgcc

SEQ ID NO: 8656 - RNA, 20 nt, Artificial Sequence
  SARM1 targeting guide sequence portion
cggcauccaccugggcgugc

SEQ ID NO: 8657 - RNA, 20 nt, Artificial Sequence
  SARM1 targeting guide sequence portion
cggccuggaccgcucccugc

SEQ ID NO: 8658 - RNA, 20 nt, Artificial Sequence
  SARM1 targeting guide sequence portion
cggccuggucagcugcggcc

SEQ ID NO: 8659 - RNA, 20 nt, Artificial Sequence
  SARM1 targeting guide sequence portion
cgggcgcggugcacgcccag

SEQ ID NO: 8660 - RNA, 20 nt, Artificial Sequence
  SARM1 targeting guide sequence portion
cggguccaggcugcccagcc

SEQ ID NO: 8661 - RNA, 20 nt, Artificial Sequence
  SARM1 targeting guide sequence portion
cgguccaggccgcagcugac

SEQ ID NO: 8662 - RNA, 20 nt, Artificial Sequence
  SARM1 targeting guide sequence portion
cggucgcacguagaauaguu

SEQ ID NO: 8663 - RNA, 20 nt, Artificial Sequence
  SARM1 targeting guide sequence portion
cggugcacgcccagguggau

SEQ ID NO: 8664 - RNA, 20 nt, Artificial Sequence
  SARM1 targeting guide sequence portion
cggugcagcagggagcgguc

SEQ ID NO: 8665 - RNA, 20 nt, Artificial Sequence
  SARM1 targeting guide sequence portion
cguagaauaguuggcgaagg

SEQ ID NO: 8666 - RNA, 20 nt, Artificial Sequence
  SARM1 targeting guide sequence portion
cguagguguacuggcggaag

SEQ ID NO: 8667 - RNA, 20 nt, Artificial Sequence
  SARM1 targeting guide sequence portion
cgugagcucccuaaagaacc

SEQ ID NO: 8668 - RNA, 20 nt, Artificial Sequence
  SARM1 targeting guide sequence portion
cgugaggaugcgggcgcggu

SEQ ID NO: 8669 - RNA, 20 nt, Artificial Sequence
  SARM1 targeting guide sequence portion
cgugcaccgcgcccgcaucc

SEQ ID NO: 8670 - RNA, 20 nt, Artificial Sequence
  SARM1 targeting guide sequence portion
cgugcgaccgcagcaaccug

SEQ ID NO: 8671 - RNA, 20 nt, Artificial Sequence
  SARM1 targeting guide sequence portion
cgugucugagcagcagcugc

SEQ ID NO: 8672 - RNA, 20 nt, Artificial Sequence
  SARM1 targeting guide sequence portion
cuacggccuggucagcugcg

SEQ ID NO: 8673 - RNA, 20 nt, Artificial Sequence
  SARM1 targeting guide sequence portion
cuacgugcgaccgcagcaac

SEQ ID NO: 8674 - RNA, 20 nt, Artificial Sequence
  SARM1 targeting guide sequence portion
cuauucuacgugcgaccgca

SEQ ID NO: 8675 - RNA, 20 nt, Artificial Sequence
  SARM1 targeting guide sequence portion
cucaagaccuucgccaacua

SEQ ID NO: 8676 - RNA, 20 nt, Artificial Sequence
  SARM1 targeting guide sequence portion
cucacggagcucaagaccuu

SEQ ID NO: 8677 - RNA, 20 nt, Artificial Sequence
  SARM1 targeting guide sequence portion
cucagacacgcggugcagca

SEQ ID NO: 8678 - RNA, 20 nt, Artificial Sequence
  SARM1 targeting guide sequence portion
cucccugcugcaccgcgugu

SEQ ID NO: 8679 - RNA, 20 nt, Artificial Sequence
  SARM1 targeting guide sequence portion
cuccgugagcucccuaaaga

SEQ ID NO: 8680 - RNA, 20 nt, Artificial Sequence
  SARM1 targeting guide sequence portion
cucuggccgccgugaggaug

SEQ ID NO: 8681 - RNA, 20 nt, Artificial Sequence
  SARM1 targeting guide sequence portion
cugaccaggccguaggugua

SEQ ID NO: 8682 - RNA, 20 nt, Artificial Sequence
  SARM1 targeting guide sequence portion
cugaccucuggccgccguga

SEQ ID NO: 8683 - RNA, 20 nt, Artificial Sequence
  SARM1 targeting guide sequence portion
cugagcagcagcugcuggaa

SEQ ID NO: 8684 - RNA, 20 nt, Artificial Sequence
  SARM1 targeting guide sequence portion
cugcaccgcgugucugagca

SEQ ID NO: 8685 - RNA, 20 nt, Artificial Sequence
  SARM1 targeting guide sequence portion
cugcccagccaguccgccag

SEQ ID NO: 8686 - RNA, 20 nt, Artificial Sequence
  SARM1 targeting guide sequence portion
cugcggcauccaccugggcg

SEQ ID NO: 8687 - RNA, 20 nt, Artificial Sequence
  SARM1 targeting guide sequence portion
cugcggccuggaccgcuccc

SEQ ID NO: 8688 - RNA, 20 nt, Artificial Sequence
  SARM1 targeting guide sequence portion
cugcggucgcacguagaaua

SEQ ID NO: 8689 - RNA, 20 nt, Artificial Sequence
  SARM1 targeting guide sequence portion
cugcucagacacgcggugca

SEQ ID NO: 8690 - RNA, 20 nt, Artificial Sequence
  SARM1 targeting guide sequence portion
cugcugcaccgcgugucuga

SEQ ID NO: 8691 - RNA, 20 nt, Artificial Sequence
  SARM1 targeting guide sequence portion
cugcugcucagacacgcggu

SEQ ID NO: 8692 - RNA, 20 nt, Artificial Sequence
  SARM1 targeting guide sequence portion
cugcuggaagacugcggcau

SEQ ID NO: 8693 - RNA, 20 nt, Artificial Sequence
  SARM1 targeting guide sequence portion
cuggaagacugcggcaucca

SEQ ID NO: 8694 - RNA, 20 nt, Artificial Sequence
  SARM1 targeting guide sequence portion
cuggacccgcgcuuccgcca

SEQ ID NO: 8695 - RNA, 20 nt, Artificial Sequence
  SARM1 targeting guide sequence portion
cuggaccgcucccugcugca

SEQ ID NO: 8696 - RNA, 20 nt, Artificial Sequence
  SARM1 targeting guide sequence portion
cuggccgccgugaggaugcg

SEQ ID NO: 8697 - RNA, 20 nt, Artificial Sequence
  SARM1 targeting guide sequence portion
cuggcggaagcgcgggucca

SEQ ID NO: 8698 - RNA, 20 nt, Artificial Sequence
  SARM1 targeting guide sequence portion
cuggcggacuggcugggcag

SEQ ID NO: 8699 - RNA, 20 nt, Artificial Sequence
  SARM1 targeting guide sequence portion
cuggcugggcagccuggacc

SEQ ID NO: 8700 - RNA, 20 nt, Artificial Sequence
  SARM1 targeting guide sequence portion
cugggcagccuggacccgcg

SEQ ID NO: 8701 - RNA, 20 nt, Artificial Sequence
  SARM1 targeting guide sequence portion
cugggcgugcaccgcgcccg

SEQ ID NO: 8702 - RNA, 20 nt, Artificial Sequence
  SARM1 targeting guide sequence portion
cuggucagcugcggccugga

SEQ ID NO: 8703 - RNA, 20 nt, Artificial Sequence
  SARM1 targeting guide sequence portion
cuuccagcagcugcugcuca

SEQ ID NO: 8704 - RNA, 20 nt, Artificial Sequence
  SARM1 targeting guide sequence portion
cuuccgccaguacaccuacg

SEQ ID NO: 8705 - RNA, 20 nt, Artificial Sequence
  SARM1 targeting guide sequence portion
cuucgccaacuauucuacgu

SEQ ID NO: 8706 - RNA, 20 nt, Artificial Sequence
  SARM1 targeting guide sequence portion
cuugagcuccgugagcuccc

SEQ ID NO: 8707 - RNA, 20 nt, Artificial Sequence
  SARM1 targeting guide sequence portion
cuuuagggagcucacggagc

SEQ ID NO: 8708 - RNA, 20 nt, Artificial Sequence
  SARM1 targeting guide sequence portion
gaagacugcggcauccaccu

SEQ ID NO: 8709 - RNA, 20 nt, Artificial Sequence
  SARM1 targeting guide sequence portion
gaagcgcggguccaggcugc

SEQ ID NO: 8710 - RNA, 20 nt, Artificial Sequence
  SARM1 targeting guide sequence portion
gaaggucuugagcuccguga

SEQ ID NO: 8711 - RNA, 20 nt, Artificial Sequence
  SARM1 targeting guide sequence portion
gaauaguuggcgaaggucuu

SEQ ID NO: 8712 - RNA, 20 nt, Artificial Sequence
  SARM1 targeting guide sequence portion
gacacgcggugcagcaggga

SEQ ID NO: 8713 - RNA, 20 nt, Artificial Sequence
  SARM1 targeting guide sequence portion
gaccaggccguagguguacu

SEQ ID NO: 8714 - RNA, 20 nt, Artificial Sequence
  SARM1 targeting guide sequence portion
gacccgcgcuuccgccagua

SEQ ID NO: 8715 - RNA, 20 nt, Artificial Sequence
  SARM1 targeting guide sequence portion
gaccgcagcaaccuggcgga

SEQ ID NO: 8716 - RNA, 20 nt, Artificial Sequence
  SARM1 targeting guide sequence portion
gaccgcucccugcugcaccg

SEQ ID NO: 8717 - RNA, 20 nt, Artificial Sequence
  SARM1 targeting guide sequence portion
gaccucuggccgccgugagg

SEQ ID NO: 8718 - RNA, 20 nt, Artificial Sequence
  SARM1 targeting guide sequence portion
gaccuucgccaacuauucua

SEQ ID NO: 8719 - RNA, 20 nt, Artificial Sequence
  SARM1 targeting guide sequence portion
gacugcggcauccaccuggg

SEQ ID NO: 8720 - RNA, 20 nt, Artificial Sequence
  SARM1 targeting guide sequence portion
gacuggcugggcagccugga

SEQ ID NO: 8721 - RNA, 20 nt, Artificial Sequence
  SARM1 targeting guide sequence portion
gagcagcagcugcuggaaga

SEQ ID NO: 8722 - RNA, 20 nt, Artificial Sequence
  SARM1 targeting guide sequence portion
gagcgguccaggccgcagcu

SEQ ID NO: 8723 - RNA, 20 nt, Artificial Sequence
  SARM1 targeting guide sequence portion
gagcucaagaccuucgccaa

SEQ ID NO: 8724 - RNA, 20 nt, Artificial Sequence
  SARM1 targeting guide sequence portion
gagcucacggagcucaagac

SEQ ID NO: 8725 - RNA, 20 nt, Artificial Sequence
  SARM1 targeting guide sequence portion
gagcuccgugagcucccuaa

SEQ ID NO: 8726 - RNA, 20 nt, Artificial Sequence
  SARM1 targeting guide sequence portion
gaggaugcgggcgcggugca

SEQ ID NO: 8727 - RNA, 20 nt, Artificial Sequence
  SARM1 targeting guide sequence portion
gaugccgcagucuuccagca

SEQ ID NO: 8728 - RNA, 20 nt, Artificial Sequence
  SARM1 targeting guide sequence portion
gaugcgggcgcggugcacgc

SEQ ID NO: 8729 - RNA, 20 nt, Artificial Sequence
  SARM1 targeting guide sequence portion
gcaaccuggcggacuggcug

SEQ ID NO: 8730 - RNA, 20 nt, Artificial Sequence
  SARM1 targeting guide sequence portion
gcaccgcgcccgcauccuca

SEQ ID NO: 8731 - RNA, 20 nt, Artificial Sequence
  SARM1 targeting guide sequence portion
gcaccgcgugucugagcagc

SEQ ID NO: 8732 - RNA, 20 nt, Artificial Sequence
  SARM1 targeting guide sequence portion
gcacgcccagguggaugccg

SEQ ID NO: 8733 - RNA, 20 nt, Artificial Sequence
  SARM1 targeting guide sequence portion
gcacguagaauaguuggcga

SEQ ID NO: 8734 - RNA, 20 nt, Artificial Sequence
  SARM1 targeting guide sequence portion
gcagcaaccuggcggacugg

SEQ ID NO: 8735 - RNA, 20 nt, Artificial Sequence
  SARM1 targeting guide sequence portion
gcagcagcugcuggaagacu

SEQ ID NO: 8736 - RNA, 20 nt, Artificial Sequence
  SARM1 targeting guide sequence portion
gcagcagggagcgguccagg

SEQ ID NO: 8737 - RNA, 20 nt, Artificial Sequence
  SARM1 targeting guide sequence portion
gcagccuggacccgcgcuuc

SEQ ID NO: 8738 - RNA, 20 nt, Artificial Sequence
  SARM1 targeting guide sequence portion
gcagcugaccaggccguagg

SEQ ID NO: 8739 - RNA, 20 nt, Artificial Sequence
  SARM1 targeting guide sequence portion
gcagcugcugcucagacacg

SEQ ID NO: 8740 - RNA, 20 nt, Artificial Sequence
  SARM1 targeting guide sequence portion
gcagcugcuggaagacugcg

SEQ ID NO: 8741 - RNA, 20 nt, Artificial Sequence
  SARM1 targeting guide sequence portion
gcagggagcgguccaggccg

SEQ ID NO: 8742 - RNA, 20 nt, Artificial Sequence
  SARM1 targeting guide sequence portion
gcagguucuuuagggagcuc

SEQ ID NO: 8743 - RNA, 20 nt, Artificial Sequence
  SARM1 targeting guide sequence portion
gcagucuuccagcagcugcu

SEQ ID NO: 8744 - RNA, 20 nt, Artificial Sequence
  SARM1 targeting guide sequence portion
gcauccaccugggcgugcac

SEQ ID NO: 8745 - RNA, 20 nt, Artificial Sequence
  SARM1 targeting guide sequence portion
gcauccucacggcggccaga

SEQ ID NO: 8746 - RNA, 20 nt, Artificial Sequence
  SARM1 targeting guide sequence portion
gccaacuauucuacgugcga

SEQ ID NO: 8747 - RNA, 20 nt, Artificial Sequence
  SARM1 targeting guide sequence portion
gccagguugcugcggucgca

SEQ ID NO: 8748 - RNA, 20 nt, Artificial Sequence
  SARM1 targeting guide sequence portion
gccaguacaccuacggccug

SEQ ID NO: 8749 - RNA, 20 nt, Artificial Sequence
  SARM1 targeting guide sequence portion
gccaguccgccagguugcug

SEQ ID NO: 8750 - RNA, 20 nt, Artificial Sequence
  SARM1 targeting guide sequence portion
gcccagccaguccgccaggu

SEQ ID NO: 8751 - RNA, 20 nt, Artificial Sequence
  SARM1 targeting guide sequence portion
gcccagguggaugccgcagu

SEQ ID NO: 8752 - RNA, 20 nt, Artificial Sequence
  SARM1 targeting guide sequence portion
gcccgcauccucacggcggc

SEQ ID NO: 8753 - RNA, 20 nt, Artificial Sequence
  SARM1 targeting guide sequence portion
gccgcagcugaccaggccgu

SEQ ID NO: 8754 - RNA, 20 nt, Artificial Sequence
  SARM1 targeting guide sequence portion
gccgcagucuuccagcagcu

SEQ ID NO: 8755 - RNA, 20 nt, Artificial Sequence
  SARM1 targeting guide sequence portion
gccgccgugaggaugcgggc

SEQ ID NO: 8756 - RNA, 20 nt, Artificial Sequence
  SARM1 targeting guide sequence portion
gccguagguguacuggcgga

SEQ ID NO: 8757 - RNA, 20 nt, Artificial Sequence
  SARM1 targeting guide sequence portion
gccgugaggaugcgggcgcg

SEQ ID NO: 8758 - RNA, 20 nt, Artificial Sequence
  SARM1 targeting guide sequence portion
gccuggacccgcgcuuccgc

SEQ ID NO: 8759 - RNA, 20 nt, Artificial Sequence
  SARM1 targeting guide sequence portion
gccuggaccgcucccugcug

SEQ ID NO: 8760 - RNA, 20 nt, Artificial Sequence
  SARM1 targeting guide sequence portion
gccuggucagcugcggccug

SEQ ID NO: 8761 - RNA, 20 nt, Artificial Sequence
  SARM1 targeting guide sequence portion
gcgaaggucuugagcuccgu

SEQ ID NO: 8762 - RNA, 20 nt, Artificial Sequence
  SARM1 targeting guide sequence portion
gcgaccgcagcaaccuggcg

SEQ ID NO: 8763 - RNA, 20 nt, Artificial Sequence
  SARM1 targeting guide sequence portion
gcgcccgcauccucacggcg

SEQ ID NO: 8764 - RNA, 20 nt, Artificial Sequence
  SARM1 targeting guide sequence portion
gcgcggguccaggcugccca

SEQ ID NO: 8765 - RNA, 20 nt, Artificial Sequence
  SARM1 targeting guide sequence portion
gcgcggugcacgcccaggug

SEQ ID NO: 8766 - RNA, 20 nt, Artificial Sequence
  SARM1 targeting guide sequence portion
gcgcuuccgccaguacaccu

SEQ ID NO: 8767 - RNA, 20 nt, Artificial Sequence
  SARM1 targeting guide sequence portion
gcggaagcgcggguccaggc

SEQ ID NO: 8768 - RNA, 20 nt, Artificial Sequence
  SARM1 targeting guide sequence portion
gcggacuggcugggcagccu

SEQ ID NO: 8769 - RNA, 20 nt, Artificial Sequence
  SARM1 targeting guide sequence portion
gcggcauccaccugggcgug

SEQ ID NO: 8770 - RNA, 20 nt, Artificial Sequence
  SARM1 targeting guide sequence portion
gcggccuggaccgcucccug

SEQ ID NO: 8771 - RNA, 20 nt, Artificial Sequence
  SARM1 targeting guide sequence portion
gcgggcgcggugcacgccca

SEQ ID NO: 8772 - RNA, 20 nt, Artificial Sequence
  SARM1 targeting guide sequence portion
gcggguccaggcugcccagc

SEQ ID NO: 8773 - RNA, 20 nt, Artificial Sequence
  SARM1 targeting guide sequence portion
gcgguccaggccgcagcuga

SEQ ID NO: 8774 - RNA, 20 nt, Artificial Sequence
  SARM1 targeting guide sequence portion
gcggucgcacguagaauagu

SEQ ID NO: 8775 - RNA, 20 nt, Artificial Sequence
  SARM1 targeting guide sequence portion
gcggugcacgcccaggugga

SEQ ID NO: 8776 - RNA, 20 nt, Artificial Sequence
  SARM1 targeting guide sequence portion
gcggugcagcagggagcggu

SEQ ID NO: 8777 - RNA, 20 nt, Artificial Sequence
  SARM1 targeting guide sequence portion
gcgugcaccgcgcccgcauc

SEQ ID NO: 8778 - RNA, 20 nt, Artificial Sequence
  SARM1 targeting guide sequence portion
gcgugucugagcagcagcug

SEQ ID NO: 8779 - RNA, 20 nt, Artificial Sequence
  SARM1 targeting guide sequence portion
gcucaagaccuucgccaacu

SEQ ID NO: 8780 - RNA, 20 nt, Artificial Sequence
  SARM1 targeting guide sequence portion
gcucacggagcucaagaccu

SEQ ID NO: 8781 - RNA, 20 nt, Artificial Sequence
  SARM1 targeting guide sequence portion
gcucagacacgcggugcagc

SEQ ID NO: 8782 - RNA, 20 nt, Artificial Sequence
  SARM1 targeting guide sequence portion
gcucccugcugcaccgcgug

SEQ ID NO: 8783 - RNA, 20 nt, Artificial Sequence
  SARM1 targeting guide sequence portion
gcuccgugagcucccuaaag

SEQ ID NO: 8784 - RNA, 20 nt, Artificial Sequence
  SARM1 targeting guide sequence portion
gcugaccaggccguaggugu

SEQ ID NO: 8785 - RNA, 20 nt, Artificial Sequence
  SARM1 targeting guide sequence portion
gcugaccucuggccgccgug

SEQ ID NO: 8786 - RNA, 20 nt, Artificial Sequence
  SARM1 targeting guide sequence portion
gcugcaccgcgugucugagc

SEQ ID NO: 8787 - RNA, 20 nt, Artificial Sequence
  SARM1 targeting guide sequence portion
gcugcccagccaguccgcca

SEQ ID NO: 8788 - RNA, 20 nt, Artificial Sequence
  SARM1 targeting guide sequence portion
gcugcggccuggaccgcucc

SEQ ID NO: 8789 - RNA, 20 nt, Artificial Sequence
  SARM1 targeting guide sequence portion
gcugcggucgcacguagaau

SEQ ID NO: 8790 - RNA, 20 nt, Artificial Sequence
  SARM1 targeting guide sequence portion
gcugcucagacacgcggugc

SEQ ID NO: 8791 - RNA, 20 nt, Artificial Sequence
  SARM1 targeting guide sequence portion
gcugcugcucagacacgcgg

SEQ ID NO: 8792 - RNA, 20 nt, Artificial Sequence
  SARM1 targeting guide sequence portion
gcugcuggaagacugcggca

SEQ ID NO: 8793 - RNA, 20 nt, Artificial Sequence
  SARM1 targeting guide sequence portion
gcuggaagacugcggcaucc

SEQ ID NO: 8794 - RNA, 20 nt, Artificial Sequence
  SARM1 targeting guide sequence portion
gcugggcagccuggacccgc

SEQ ID NO: 8795 - RNA, 20 nt, Artificial Sequence
  SARM1 targeting guide sequence portion
gcuuccgccaguacaccuac

SEQ ID NO: 8796 - RNA, 20 nt, Artificial Sequence
  SARM1 targeting guide sequence portion
ggaagacugcggcauccacc

SEQ ID NO: 8797 - RNA, 20 nt, Artificial Sequence
  SARM1 targeting guide sequence portion
ggaagcgcggguccaggcug

SEQ ID NO: 8798 - RNA, 20 nt, Artificial Sequence
  SARM1 targeting guide sequence portion
ggacccgcgcuuccgccagu

SEQ ID NO: 8799 - RNA, 20 nt, Artificial Sequence
  SARM1 targeting guide sequence portion
ggaccgcucccugcugcacc

SEQ ID NO: 8800 - RNA, 20 nt, Artificial Sequence
  SARM1 targeting guide sequence portion
ggacuggcugggcagccugg

SEQ ID NO: 8801 - RNA, 20 nt, Artificial Sequence
  SARM1 targeting guide sequence portion
ggagcgguccaggccgcagc

SEQ ID NO: 8802 - RNA, 20 nt, Artificial Sequence
  SARM1 targeting guide sequence portion
ggagcucaagaccuucgcca

SEQ ID NO: 8803 - RNA, 20 nt, Artificial Sequence
  SARM1 targeting guide sequence portion
ggagcucacggagcucaaga

SEQ ID NO: 8804 - RNA, 20 nt, Artificial Sequence
  SARM1 targeting guide sequence portion
ggaugccgcagucuuccagc

SEQ ID NO: 8805 - RNA, 20 nt, Artificial Sequence
  SARM1 targeting guide sequence portion
ggaugcgggcgcggugcacg

SEQ ID NO: 8806 - RNA, 20 nt, Artificial Sequence
  SARM1 targeting guide sequence portion
ggcagccuggacccgcgcuu

SEQ ID NO: 8807 - RNA, 20 nt, Artificial Sequence
  SARM1 targeting guide sequence portion
ggcauccaccugggcgugca

SEQ ID NO: 8808 - RNA, 20 nt, Artificial Sequence
  SARM1 targeting guide sequence portion
ggccgcagcugaccaggccg

SEQ ID NO: 8809 - RNA, 20 nt, Artificial Sequence
  SARM1 targeting guide sequence portion
ggccgccgugaggaugcggg

SEQ ID NO: 8810 - RNA, 20 nt, Artificial Sequence
  SARM1 targeting guide sequence portion
ggccguagguguacuggcgg

SEQ ID NO: 8811 - RNA, 20 nt, Artificial Sequence
  SARM1 targeting guide sequence portion
ggccuggaccgcucccugcu

SEQ ID NO: 8812 - RNA, 20 nt, Artificial Sequence
  SARM1 targeting guide sequence portion
ggccuggucagcugcggccu

SEQ ID NO: 8813 - RNA, 20 nt, Artificial Sequence
  SARM1 targeting guide sequence portion
ggcgaaggucuugagcuccg

SEQ ID NO: 8814 - RNA, 20 nt, Artificial Sequence
  SARM1 targeting guide sequence portion
ggcgcggugcacgcccaggu

SEQ ID NO: 8815 - RNA, 20 nt, Artificial Sequence
  SARM1 targeting guide sequence portion
ggcggaagcgcggguccagg

SEQ ID NO: 8816 - RNA, 20 nt, Artificial Sequence
  SARM1 targeting guide sequence portion
ggcggacuggcugggcagcc

SEQ ID NO: 8817 - RNA, 20 nt, Artificial Sequence
  SARM1 targeting guide sequence portion
ggcgugcaccgcgcccgcau

SEQ ID NO: 8818 - RNA, 20 nt, Artificial Sequence
  SARM1 targeting guide sequence portion
ggcugaccucuggccgccgu

SEQ ID NO: 8819 - RNA, 20 nt, Artificial Sequence
  SARM1 targeting guide sequence portion
ggcugcccagccaguccgcc

SEQ ID NO: 8820 - RNA, 20 nt, Artificial Sequence
  SARM1 targeting guide sequence portion
ggcugggcagccuggacccg

SEQ ID NO: 8821 - RNA, 20 nt, Artificial Sequence
  SARM1 targeting guide sequence portion
gggagcgguccaggccgcag

SEQ ID NO: 8822 - RNA, 20 nt, Artificial Sequence
  SARM1 targeting guide sequence portion
gggagcucacggagcucaag

SEQ ID NO: 8823 - RNA, 20 nt, Artificial Sequence
  SARM1 targeting guide sequence portion
gggcagccuggacccgcgcu

SEQ ID NO: 8824 - RNA, 20 nt, Artificial Sequence
  SARM1 targeting guide sequence portion
gggcgcggugcacgcccagg

SEQ ID NO: 8825 - RNA, 20 nt, Artificial Sequence
  SARM1 targeting guide sequence portion
gggcgugcaccgcgcccgca

SEQ ID NO: 8826 - RNA, 20 nt, Artificial Sequence
  SARM1 targeting guide sequence portion
ggguccaggcugcccagcca

SEQ ID NO: 8827 - RNA, 20 nt, Artificial Sequence
  SARM1 targeting guide sequence portion
ggucagcugcggccuggacc

SEQ ID NO: 8828 - RNA, 20 nt, Artificial Sequence
  SARM1 targeting guide sequence portion
gguccaggccgcagcugacc

SEQ ID NO: 8829 - RNA, 20 nt, Artificial Sequence
  SARM1 targeting guide sequence portion
gguccaggcugcccagccag

SEQ ID NO: 8830 - RNA, 20 nt, Artificial Sequence
  SARM1 targeting guide sequence portion
ggucgcacguagaauaguug

SEQ ID NO: 8831 - RNA, 20 nt, Artificial Sequence
  SARM1 targeting guide sequence portion
ggucuugagcuccgugagcu

SEQ ID NO: 8832 - RNA, 20 nt, Artificial Sequence
  SARM1 targeting guide sequence portion
ggugcacgcccagguggaug

SEQ ID NO: 8833 - RNA, 20 nt, Artificial Sequence
  SARM1 targeting guide sequence portion
ggugcagcagggagcggucc

SEQ ID NO: 8834 - RNA, 20 nt, Artificial Sequence
  SARM1 targeting guide sequence portion
ggugcagguucuuuagggag

SEQ ID NO: 8835 - RNA, 20 nt, Artificial Sequence
  SARM1 targeting guide sequence portion
gguggaugccgcagucuucc

SEQ ID NO: 8836 - RNA, 20 nt, Artificial Sequence
  SARM1 targeting guide sequence portion
gguguacuggcggaagcgcg

SEQ ID NO: 8837 - RNA, 20 nt, Artificial Sequence
  SARM1 targeting guide sequence portion
gguucuuuagggagcucacg

SEQ ID NO: 8838 - RNA, 20 nt, Artificial Sequence
  SARM1 targeting guide sequence portion
gguugcugcggucgcacgua

SEQ ID NO: 8839 - RNA, 20 nt, Artificial Sequence
  SARM1 targeting guide sequence portion
guacaccuacggccugguca

SEQ ID NO: 8840 - RNA, 20 nt, Artificial Sequence
  SARM1 targeting guide sequence portion
guacuggcggaagcgcgggu

SEQ ID NO: 8841 - RNA, 20 nt, Artificial Sequence
  SARM1 targeting guide sequence portion
guagaauaguuggcgaaggu

SEQ ID NO: 8842 - RNA, 20 nt, Artificial Sequence
  SARM1 targeting guide sequence portion
guagguguacuggcggaagc

SEQ ID NO: 8843 - RNA, 20 nt, Artificial Sequence
  SARM1 targeting guide sequence portion
gucagcugcggccuggaccg

SEQ ID NO: 8844 - RNA, 20 nt, Artificial Sequence
  SARM1 targeting guide sequence portion
guccaggccgcagcugacca

SEQ ID NO: 8845 - RNA, 20 nt, Artificial Sequence
  SARM1 targeting guide sequence portion
guccaggcugcccagccagu

SEQ ID NO: 8846 - RNA, 20 nt, Artificial Sequence
  SARM1 targeting guide sequence portion
guccgccagguugcugcggu

SEQ ID NO: 8847 - RNA, 20 nt, Artificial Sequence
  SARM1 targeting guide sequence portion
gucgcacguagaauaguugg

SEQ ID NO: 8848 - RNA, 20 nt, Artificial Sequence
  SARM1 targeting guide sequence portion
gucugagcagcagcugcugg

SEQ ID NO: 8849 - RNA, 20 nt, Artificial Sequence
  SARM1 targeting guide sequence portion
gucuuccagcagcugcugcu

SEQ ID NO: 8850 - RNA, 20 nt, Artificial Sequence
  SARM1 targeting guide sequence portion
gucuugagcuccgugagcuc

SEQ ID NO: 8851 - RNA, 20 nt, Artificial Sequence
  SARM1 targeting guide sequence portion
gugaggaugcgggcgcggug

SEQ ID NO: 8852 - RNA, 20 nt, Artificial Sequence
  SARM1 targeting guide sequence portion
gugcaccgcgcccgcauccu

SEQ ID NO: 8853 - RNA, 20 nt, Artificial Sequence
  SARM1 targeting guide sequence portion
gugcacgcccagguggaugc

SEQ ID NO: 8854 - RNA, 20 nt, Artificial Sequence
  SARM1 targeting guide sequence portion
gugcagcagggagcggucca

SEQ ID NO: 8855 - RNA, 20 nt, Artificial Sequence
  SARM1 targeting guide sequence portion
gugcagguucuuuagggagc

SEQ ID NO: 8856 - RNA, 20 nt, Artificial Sequence
  SARM1 targeting guide sequence portion
gugcgaccgcagcaaccugg

SEQ ID NO: 8857 - RNA, 20 nt, Artificial Sequence
  SARM1 targeting guide sequence portion
guggaugccgcagucuucca

SEQ ID NO: 8858 - RNA, 20 nt, Artificial Sequence
  SARM1 targeting guide sequence portion
guguacuggcggaagcgcgg

SEQ ID NO: 8859 - RNA, 20 nt, Artificial Sequence
  SARM1 targeting guide sequence portion
gugucugagcagcagcugcu

SEQ ID NO: 8860 - RNA, 20 nt, Artificial Sequence
  SARM1 targeting guide sequence portion
guucuuuagggagcucacgg

SEQ ID NO: 8861 - RNA, 20 nt, Artificial Sequence
  SARM1 targeting guide sequence portion
guugcugcggucgcacguag

SEQ ID NO: 8862 - RNA, 20 nt, Artificial Sequence
  SARM1 targeting guide sequence portion
guuggcgaaggucuugagcu

SEQ ID NO: 8863 - RNA, 20 nt, Artificial Sequence
  SARM1 targeting guide sequence portion
uacaccuacggccuggucag

SEQ ID NO: 8864 - RNA, 20 nt, Artificial Sequence
  SARM1 targeting guide sequence portion
uacggccuggucagcugcgg

SEQ ID NO: 8865 - RNA, 20 nt, Artificial Sequence
  SARM1 targeting guide sequence portion
uacgugcgaccgcagcaacc

SEQ ID NO: 8866 - RNA, 20 nt, Artificial Sequence
  SARM1 targeting guide sequence portion
uacuggcggaagcgcggguc

SEQ ID NO: 8867 - RNA, 20 nt, Artificial Sequence
  SARM1 targeting guide sequence portion
uagaauaguuggcgaagguc

SEQ ID NO: 8868 - RNA, 20 nt, Artificial Sequence
  SARM1 targeting guide sequence portion
uagggagcucacggagcuca

SEQ ID NO: 8869 - RNA, 20 nt, Artificial Sequence
  SARM1 targeting guide sequence portion
uagguguacuggcggaagcg

SEQ ID NO: 8870 - RNA, 20 nt, Artificial Sequence
  SARM1 targeting guide sequence portion
uaguuggcgaaggucuugag

SEQ ID NO: 8871 - RNA, 20 nt, Artificial Sequence
  SARM1 targeting guide sequence portion
uauucuacgugcgaccgcag

SEQ ID NO: 8872 - RNA, 20 nt, Artificial Sequence
  SARM1 targeting guide sequence portion
ucaagaccuucgccaacuau

SEQ ID NO: 8873 - RNA, 20 nt, Artificial Sequence
  SARM1 targeting guide sequence portion
ucacggagcucaagaccuuc

SEQ ID NO: 8874 - RNA, 20 nt, Artificial Sequence
  SARM1 targeting guide sequence portion
ucagacacgcggugcagcag

SEQ ID NO: 8875 - RNA, 20 nt, Artificial Sequence
  SARM1 targeting guide sequence portion
ucagcugcggccuggaccgc

SEQ ID NO: 8876 - RNA, 20 nt, Artificial Sequence
  SARM1 targeting guide sequence portion
uccaccugggcgugcaccgc

SEQ ID NO: 8877 - RNA, 20 nt, Artificial Sequence
  SARM1 targeting guide sequence portion
uccagcagcugcugcucaga

SEQ ID NO: 8878 - RNA, 20 nt, Artificial Sequence
  SARM1 targeting guide sequence portion
uccaggccgcagcugaccag

SEQ ID NO: 8879 - RNA, 20 nt, Artificial Sequence
  SARM1 targeting guide sequence portion
uccaggcugcccagccaguc

SEQ ID NO: 8880 - RNA, 20 nt, Artificial Sequence
  SARM1 targeting guide sequence portion
ucccugcugcaccgcguguc

SEQ ID NO: 8881 - RNA, 20 nt, Artificial Sequence
  SARM1 targeting guide sequence portion
uccgccagguugcugcgguc

SEQ ID NO: 8882 - RNA, 20 nt, Artificial Sequence
  SARM1 targeting guide sequence portion
uccgccaguacaccuacggc

SEQ ID NO: 8883 - RNA, 20 nt, Artificial Sequence
  SARM1 targeting guide sequence portion
uccgugagcucccuaaagaa

SEQ ID NO: 8884 - RNA, 20 nt, Artificial Sequence
  SARM1 targeting guide sequence portion
ucgcacguagaauaguuggc

SEQ ID NO: 8885 - RNA, 20 nt, Artificial Sequence
  SARM1 targeting guide sequence portion
ucgccaacuauucuacgugc

SEQ ID NO: 8886 - RNA, 20 nt, Artificial Sequence
  SARM1 targeting guide sequence portion
ucuacgugcgaccgcagcaa

SEQ ID NO: 8887 - RNA, 20 nt, Artificial Sequence
  SARM1 targeting guide sequence portion
ucugagcagcagcugcugga

SEQ ID NO: 8888 - RNA, 20 nt, Artificial Sequence
  SARM1 targeting guide sequence portion
ucuggccgccgugaggaugc

SEQ ID NO: 8889 - RNA, 20 nt, Artificial Sequence
  SARM1 targeting guide sequence portion
ucuuccagcagcugcugcuc

SEQ ID NO: 8890 - RNA, 20 nt, Artificial Sequence
  SARM1 targeting guide sequence portion
ucuugagcuccgugagcucc

SEQ ID NO: 8891 - RNA, 20 nt, Artificial Sequence
  SARM1 targeting guide sequence portion
ucuuuagggagcucacggag

SEQ ID NO: 8892 - RNA, 20 nt, Artificial Sequence
  SARM1 targeting guide sequence portion
ugaccaggccguagguguac

SEQ ID NO: 8893 - RNA, 20 nt, Artificial Sequence
  SARM1 targeting guide sequence portion
ugaccucuggccgccgugag

SEQ ID NO: 8894 - RNA, 20 nt, Artificial Sequence
  SARM1 targeting guide sequence portion
ugagcagcagcugcuggaag

SEQ ID NO: 8895 - RNA, 20 nt, Artificial Sequence
  SARM1 targeting guide sequence portion
ugagcuccgugagcucccua

SEQ ID NO: 8896 - RNA, 20 nt, Artificial Sequence
  SARM1 targeting guide sequence portion
ugaggaugcgggcgcggugc

SEQ ID NO: 8897 - RNA, 20 nt, Artificial Sequence
  SARM1 targeting guide sequence portion
ugcaccgcgcccgcauccuc

SEQ ID NO: 8898 - RNA, 20 nt, Artificial Sequence
  SARM1 targeting guide sequence portion
ugcaccgcgugucugagcag

SEQ ID NO: 8899 - RNA, 20 nt, Artificial Sequence
  SARM1 targeting guide sequence portion
ugcacgcccagguggaugcc

SEQ ID NO: 8900 - RNA, 20 nt, Artificial Sequence
  SARM1 targeting guide sequence portion
ugcagcagggagcgguccag

SEQ ID NO: 8901 - RNA, 20 nt, Artificial Sequence
  SARM1 targeting guide sequence portion
ugcagguucuuuagggagcu

SEQ ID NO: 8902 - RNA, 20 nt, Artificial Sequence
  SARM1 targeting guide sequence portion
ugcccagccaguccgccagg

SEQ ID NO: 8903 - RNA, 20 nt, Artificial Sequence
  SARM1 targeting guide sequence portion
ugccgcagucuuccagcagc

SEQ ID NO: 8904 - RNA, 20 nt, Artificial Sequence
  SARM1 targeting guide sequence portion
ugcgaccgcagcaaccuggc

SEQ ID NO: 8905 - RNA, 20 nt, Artificial Sequence
  SARM1 targeting guide sequence portion
ugcggcauccaccugggcgu

SEQ ID NO: 8906 - RNA, 20 nt, Artificial Sequence
  SARM1 targeting guide sequence portion
ugcggccuggaccgcucccu

SEQ ID NO: 8907 - RNA, 20 nt, Artificial Sequence
  SARM1 targeting guide sequence portion
ugcgggcgcggugcacgccc

SEQ ID NO: 8908 - RNA, 20 nt, Artificial Sequence
  SARM1 targeting guide sequence portion
ugcggucgcacguagaauag

SEQ ID NO: 8909 - RNA, 20 nt, Artificial Sequence
  SARM1 targeting guide sequence portion
ugcucagacacgcggugcag

SEQ ID NO: 8910 - RNA, 20 nt, Artificial Sequence
  SARM1 targeting guide sequence portion
ugcugcaccgcgugucugag

SEQ ID NO: 8911 - RNA, 20 nt, Artificial Sequence
  SARM1 targeting guide sequence portion
ugcugcggucgcacguagaa

SEQ ID NO: 8912 - RNA, 20 nt, Artificial Sequence
  SARM1 targeting guide sequence portion
ugcugcucagacacgcggug

SEQ ID NO: 8913 - RNA, 20 nt, Artificial Sequence
  SARM1 targeting guide sequence portion
ugcuggaagacugcggcauc

SEQ ID NO: 8914 - RNA, 20 nt, Artificial Sequence
  SARM1 targeting guide sequence portion
uggaagacugcggcauccac

SEQ ID NO: 8915 - RNA, 20 nt, Artificial Sequence
  SARM1 targeting guide sequence portion
uggacccgcgcuuccgccag

SEQ ID NO: 8916 - RNA, 20 nt, Artificial Sequence
  SARM1 targeting guide sequence portion
uggaccgcucccugcugcac

SEQ ID NO: 8917 - RNA, 20 nt, Artificial Sequence
  SARM1 targeting guide sequence portion
uggaugccgcagucuuccag

SEQ ID NO: 8918 - RNA, 20 nt, Artificial Sequence
  SARM1 targeting guide sequence portion
uggccgccgugaggaugcgg

SEQ ID NO: 8919 - RNA, 20 nt, Artificial Sequence
  SARM1 targeting guide sequence portion
uggcgaaggucuugagcucc

SEQ ID NO: 8920 - RNA, 20 nt, Artificial Sequence
  SARM1 targeting guide sequence portion
uggcggaagcgcggguccag

SEQ ID NO: 8921 - RNA, 20 nt, Artificial Sequence
  SARM1 targeting guide sequence portion
uggcggacuggcugggcagc

SEQ ID NO: 8922 - RNA, 20 nt, Artificial Sequence
  SARM1 targeting guide sequence portion
uggcugggcagccuggaccc

SEQ ID NO: 8923 - RNA, 20 nt, Artificial Sequence
  SARM1 targeting guide sequence portion
ugggcagccuggacccgcgc

SEQ ID NO: 8924 - RNA, 20 nt, Artificial Sequence
  SARM1 targeting guide sequence portion
ugggcgugcaccgcgcccgc

SEQ ID NO: 8925 - RNA, 20 nt, Artificial Sequence
  SARM1 targeting guide sequence portion
uggucagcugcggccuggac

SEQ ID NO: 8926 - RNA, 20 nt, Artificial Sequence
  SARM1 targeting guide sequence portion
uguacuggcggaagcgcggg

SEQ ID NO: 8927 - RNA, 20 nt, Artificial Sequence
  SARM1 targeting guide sequence portion
ugucugagcagcagcugcug

SEQ ID NO: 8928 - RNA, 20 nt, Artificial Sequence
  SARM1 targeting guide sequence portion
uuagggagcucacggagcuc

SEQ ID NO: 8929 - RNA, 20 nt, Artificial Sequence
  SARM1 targeting guide sequence portion
uuccagcagcugcugcucag

SEQ ID NO: 8930 - RNA, 20 nt, Artificial Sequence
  SARM1 targeting guide sequence portion
uuccgccaguacaccuacgg

SEQ ID NO: 8931 - RNA, 20 nt, Artificial Sequence
  SARM1 targeting guide sequence portion
uucgccaacuauucuacgug

SEQ ID NO: 8932 - RNA, 20 nt, Artificial Sequence
  SARM1 targeting guide sequence portion
uucuacgugcgaccgcagca

SEQ ID NO: 8933 - RNA, 20 nt, Artificial Sequence
  SARM1 targeting guide sequence portion
uucuuuagggagcucacgga

SEQ ID NO: 8934 - RNA, 20 nt, Artificial Sequence
  SARM1 targeting guide sequence portion
uugagcuccgugagcucccu

SEQ ID NO: 8935 - RNA, 20 nt, Artificial Sequence
  SARM1 targeting guide sequence portion
uugcugcggucgcacguaga

SEQ ID NO: 8936 - RNA, 20 nt, Artificial Sequence
  SARM1 targeting guide sequence portion
uuggcgaaggucuugagcuc

SEQ ID NO: 8937 - RNA, 20 nt, Artificial Sequence
  SARM1 targeting guide sequence portion
uuuagggagcucacggagcu

SEQ ID NO: 8938 - RNA, 21 nt, Artificial Sequence
  SARM1 targeting guide sequence portion
aaccuggcggacuggcugggc

SEQ ID NO: 8939 - RNA, 21 nt, Artificial Sequence
  SARM1 targeting guide sequence portion
aacuauucuacgugcgaccgc

SEQ ID NO: 8940 - RNA, 21 nt, Artificial Sequence
  SARM1 targeting guide sequence portion
aagaccuucgccaacuauucu

SEQ ID NO: 8941 - RNA, 21 nt, Artificial Sequence
  SARM1 targeting guide sequence portion
aagacugcggcauccaccugg

SEQ ID NO: 8942 - RNA, 21 nt, Artificial Sequence
  SARM1 targeting guide sequence portion
aagcgcggguccaggcugccc

SEQ ID NO: 8943 - RNA, 21 nt, Artificial Sequence
  SARM1 targeting guide sequence portion
aaggucuugagcuccgugagc

SEQ ID NO: 8944 - RNA, 21 nt, Artificial Sequence
  SARM1 targeting guide sequence portion
aauaguuggcgaaggucuuga

SEQ ID NO: 8945 - RNA, 21 nt, Artificial Sequence
  SARM1 targeting guide sequence portion
acaccuacggccuggucagcu

SEQ ID NO: 8946 - RNA, 21 nt, Artificial Sequence
  SARM1 targeting guide sequence portion
acacgcggugcagcagggagc

SEQ ID NO: 8947 - RNA, 21 nt, Artificial Sequence
  SARM1 targeting guide sequence portion
accaggccguagguguacugg

SEQ ID NO: 8948 - RNA, 21 nt, Artificial Sequence
  SARM1 targeting guide sequence portion
acccgcgcuuccgccaguaca

SEQ ID NO: 8949 - RNA, 21 nt, Artificial Sequence
  SARM1 targeting guide sequence portion
accgcagcaaccuggcggacu

SEQ ID NO: 8950 - RNA, 21 nt, Artificial Sequence
  SARM1 targeting guide sequence portion
accgcgcccgcauccucacgg

SEQ ID NO: 8951 - RNA, 21 nt, Artificial Sequence
  SARM1 targeting guide sequence portion
accgcgugucugagcagcagc

SEQ ID NO: 8952 - RNA, 21 nt, Artificial Sequence
  SARM1 targeting guide sequence portion
accgcucccugcugcaccgcg

SEQ ID NO: 8953 - RNA, 21 nt, Artificial Sequence
  SARM1 targeting guide sequence portion
accuacggccuggucagcugc

SEQ ID NO: 8954 - RNA, 21 nt, Artificial Sequence
  SARM1 targeting guide sequence portion
accucuggccgccgugaggau

SEQ ID NO: 8955 - RNA, 21 nt, Artificial Sequence
  SARM1 targeting guide sequence portion
accuggcggacuggcugggca

SEQ ID NO: 8956 - RNA, 21 nt, Artificial Sequence
  SARM1 targeting guide sequence portion
accugggcgugcaccgcgccc

SEQ ID NO: 8957 - RNA, 21 nt, Artificial Sequence
  SARM1 targeting guide sequence portion
accuucgccaacuauucuacg

SEQ ID NO: 8958 - RNA, 21 nt, Artificial Sequence
  SARM1 targeting guide sequence portion
acgcccagguggaugccgcag

SEQ ID NO: 8959 - RNA, 21 nt, Artificial Sequence
  SARM1 targeting guide sequence portion
acgcggugcagcagggagcgg

SEQ ID NO: 8960 - RNA, 21 nt, Artificial Sequence
  SARM1 targeting guide sequence portion
acggagcucaagaccuucgcc

SEQ ID NO: 8961 - RNA, 21 nt, Artificial Sequence
  SARM1 targeting guide sequence portion
acggccuggucagcugcggcc

SEQ ID NO: 8962 - RNA, 21 nt, Artificial Sequence
  SARM1 targeting guide sequence portion
acguagaauaguuggcgaagg

SEQ ID NO: 8963 - RNA, 21 nt, Artificial Sequence
  SARM1 targeting guide sequence portion
acgugcgaccgcagcaaccug

SEQ ID NO: 8964 - RNA, 21 nt, Artificial Sequence
  SARM1 targeting guide sequence portion
acuauucuacgugcgaccgca

SEQ ID NO: 8965 - RNA, 21 nt, Artificial Sequence
  SARM1 targeting guide sequence portion
acugcggcauccaccugggcg

SEQ ID NO: 8966 - RNA, 21 nt, Artificial Sequence
  SARM1 targeting guide sequence portion
acuggcggaagcgcgggucca

SEQ ID NO: 8967 - RNA, 21 nt, Artificial Sequence
  SARM1 targeting guide sequence portion
acuggcugggcagccuggacc

SEQ ID NO: 8968 - RNA, 21 nt, Artificial Sequence
  SARM1 targeting guide sequence portion
agaauaguuggcgaaggucuu

SEQ ID NO: 8969 - RNA, 21 nt, Artificial Sequence
  SARM1 targeting guide sequence portion
agacacgcggugcagcaggga

SEQ ID NO: 8970 - RNA, 21 nt, Artificial Sequence
  SARM1 targeting guide sequence portion
agaccuucgccaacuauucua

SEQ ID NO: 8971 - RNA, 21 nt, Artificial Sequence
  SARM1 targeting guide sequence portion
agacugcggcauccaccuggg

SEQ ID NO: 8972 - RNA, 21 nt, Artificial Sequence
  SARM1 targeting guide sequence portion
agcaaccuggcggacuggcug

SEQ ID NO: 8973 - RNA, 21 nt, Artificial Sequence
  SARM1 targeting guide sequence portion
agcagcagcugcuggaagacu

SEQ ID NO: 8974 - RNA, 21 nt, Artificial Sequence
  SARM1 targeting guide sequence portion
agcagcugcugcucagacacg

SEQ ID NO: 8975 - RNA, 21 nt, Artificial Sequence
  SARM1 targeting guide sequence portion
agcagcugcuggaagacugcg

SEQ ID NO: 8976 - RNA, 21 nt, Artificial Sequence
  SARM1 targeting guide sequence portion
agcagggagcgguccaggccg

SEQ ID NO: 8977 - RNA, 21 nt, Artificial Sequence
  SARM1 targeting guide sequence portion
agccaguccgccagguugcug

SEQ ID NO: 8978 - RNA, 21 nt, Artificial Sequence
  SARM1 targeting guide sequence portion
agccuggacccgcgcuuccgc

SEQ ID NO: 8979 - RNA, 21 nt, Artificial Sequence
  SARM1 targeting guide sequence portion
agcgcggguccaggcugccca

SEQ ID NO: 8980 - RNA, 21 nt, Artificial Sequence
  SARM1 targeting guide sequence portion
agcgguccaggccgcagcuga

SEQ ID NO: 8981 - RNA, 21 nt, Artificial Sequence
  SARM1 targeting guide sequence portion
agcucaagaccuucgccaacu

SEQ ID NO: 8982 - RNA, 21 nt, Artificial Sequence
  SARM1 targeting guide sequence portion
agcucacggagcucaagaccu

SEQ ID NO: 8983 - RNA, 21 nt, Artificial Sequence
  SARM1 targeting guide sequence portion
agcuccgugagcucccuaaag

SEQ ID NO: 8984 - RNA, 21 nt, Artificial Sequence
  SARM1 targeting guide sequence portion
agcugaccaggccguaggugu

SEQ ID NO: 8985 - RNA, 21 nt, Artificial Sequence
  SARM1 targeting guide sequence portion
agcugcggccuggaccgcucc

SEQ ID NO: 8986 - RNA, 21 nt, Artificial Sequence
  SARM1 targeting guide sequence portion
agcugcugcucagacacgcgg

SEQ ID NO: 8987 - RNA, 21 nt, Artificial Sequence
  SARM1 targeting guide sequence portion
agcugcuggaagacugcggca

SEQ ID NO: 8988 - RNA, 21 nt, Artificial Sequence
  SARM1 targeting guide sequence portion
aggaugcgggcgcggugcacg

SEQ ID NO: 8989 - RNA, 21 nt, Artificial Sequence
  SARM1 targeting guide sequence portion
aggccgcagcugaccaggccg

SEQ ID NO: 8990 - RNA, 21 nt, Artificial Sequence
  SARM1 targeting guide sequence portion
aggccguagguguacuggcgg

SEQ ID NO: 8991 - RNA, 21 nt, Artificial Sequence
  SARM1 targeting guide sequence portion
aggcugcccagccaguccgcc

SEQ ID NO: 8992 - RNA, 21 nt, Artificial Sequence
  SARM1 targeting guide sequence portion
agggagcgguccaggccgcag

SEQ ID NO: 8993 - RNA, 21 nt, Artificial Sequence
  SARM1 targeting guide sequence portion
agggagcucacggagcucaag

SEQ ID NO: 8994 - RNA, 21 nt, Artificial Sequence
  SARM1 targeting guide sequence portion
aggucuugagcuccgugagcu

SEQ ID NO: 8995 - RNA, 21 nt, Artificial Sequence
  SARM1 targeting guide sequence portion
agguggaugccgcagucuucc

SEQ ID NO: 8996 - RNA, 21 nt, Artificial Sequence
  SARM1 targeting guide sequence portion
agguguacuggcggaagcgcg

SEQ ID NO: 8997 - RNA, 21 nt, Artificial Sequence
  SARM1 targeting guide sequence portion
agguucuuuagggagcucacg

SEQ ID NO: 8998 - RNA, 21 nt, Artificial Sequence
  SARM1 targeting guide sequence portion
agguugcugcggucgcacgua

SEQ ID NO: 8999 - RNA, 21 nt, Artificial Sequence
  SARM1 targeting guide sequence portion
aguacaccuacggccugguca

SEQ ID NO: 9000 - RNA, 21 nt, Artificial Sequence
  SARM1 targeting guide sequence portion
aguccgccagguugcugcggu

SEQ ID NO: 9001 - RNA, 21 nt, Artificial Sequence
  SARM1 targeting guide sequence portion
agucuuccagcagcugcugcu

SEQ ID NO: 9002 - RNA, 21 nt, Artificial Sequence
  SARM1 targeting guide sequence portion
aguuggcgaaggucuugagcu

SEQ ID NO: 9003 - RNA, 21 nt, Artificial Sequence
  SARM1 targeting guide sequence portion
auaguuggcgaaggucuugag

SEQ ID NO: 9004 - RNA, 21 nt, Artificial Sequence
  SARM1 targeting guide sequence portion
auccaccugggcgugcaccgc

SEQ ID NO: 9005 - RNA, 21 nt, Artificial Sequence
  SARM1 targeting guide sequence portion
augccgcagucuuccagcagc

SEQ ID NO: 9006 - RNA, 21 nt, Artificial Sequence
  SARM1 targeting guide sequence portion
augcgggcgcggugcacgccc

SEQ ID NO: 9007 - RNA, 21 nt, Artificial Sequence
  SARM1 targeting guide sequence portion
auucuacgugcgaccgcagca

SEQ ID NO: 9008 - RNA, 21 nt, Artificial Sequence
  SARM1 targeting guide sequence portion
caaccuggcggacuggcuggg

SEQ ID NO: 9009 - RNA, 21 nt, Artificial Sequence
  SARM1 targeting guide sequence portion
caacuauucuacgugcgaccg

SEQ ID NO: 9010 - RNA, 21 nt, Artificial Sequence
  SARM1 targeting guide sequence portion
caagaccuucgccaacuauuc

SEQ ID NO: 9011 - RNA, 21 nt, Artificial Sequence
  SARM1 targeting guide sequence portion
caccgcgcccgcauccucacg

SEQ ID NO: 9012 - RNA, 21 nt, Artificial Sequence
  SARM1 targeting guide sequence portion
caccgcgugucugagcagcag

SEQ ID NO: 9013 - RNA, 21 nt, Artificial Sequence
  SARM1 targeting guide sequence portion
caccuacggccuggucagcug

SEQ ID NO: 9014 - RNA, 21 nt, Artificial Sequence
  SARM1 targeting guide sequence portion
caccugggcgugcaccgcgcc

SEQ ID NO: 9015 - RNA, 21 nt, Artificial Sequence
  SARM1 targeting guide sequence portion
cacgcccagguggaugccgca

SEQ ID NO: 9016 - RNA, 21 nt, Artificial Sequence
  SARM1 targeting guide sequence portion
cacgcggugcagcagggagcg

SEQ ID NO: 9017 - RNA, 21 nt, Artificial Sequence
  SARM1 targeting guide sequence portion
cacggagcucaagaccuucgc

SEQ ID NO: 9018 - RNA, 21 nt, Artificial Sequence
  SARM1 targeting guide sequence portion
cacguagaauaguuggcgaag

SEQ ID NO: 9019 - RNA, 21 nt, Artificial Sequence
  SARM1 targeting guide sequence portion
cagacacgcggugcagcaggg

SEQ ID NO: 9020 - RNA, 21 nt, Artificial Sequence
  SARM1 targeting guide sequence portion
cagcaaccuggcggacuggcu

SEQ ID NO: 9021 - RNA, 21 nt, Artificial Sequence
  SARM1 targeting guide sequence portion
cagcagcugcugcucagacac

SEQ ID NO: 9022 - RNA, 21 nt, Artificial Sequence
  SARM1 targeting guide sequence portion
cagcagcugcuggaagacugc

SEQ ID NO: 9023 - RNA, 21 nt, Artificial Sequence
  SARM1 targeting guide sequence portion
cagcagggagcgguccaggcc

SEQ ID NO: 9024 - RNA, 21 nt, Artificial Sequence
  SARM1 targeting guide sequence portion
cagccaguccgccagguugcu

SEQ ID NO: 9025 - RNA, 21 nt, Artificial Sequence
  SARM1 targeting guide sequence portion
cagccuggacccgcgcuuccg

SEQ ID NO: 9026 - RNA, 21 nt, Artificial Sequence
  SARM1 targeting guide sequence portion
cagcugaccaggccguaggug

SEQ ID NO: 9027 - RNA, 21 nt, Artificial Sequence
  SARM1 targeting guide sequence portion
cagcugcggccuggaccgcuc

SEQ ID NO: 9028 - RNA, 21 nt, Artificial Sequence
  SARM1 targeting guide sequence portion
cagcugcugcucagacacgcg

SEQ ID NO: 9029 - RNA, 21 nt, Artificial Sequence
  SARM1 targeting guide sequence portion
cagcugcuggaagacugcggc

SEQ ID NO: 9030 - RNA, 21 nt, Artificial Sequence
  SARM1 targeting guide sequence portion
caggccgcagcugaccaggcc

SEQ ID NO: 9031 - RNA, 21 nt, Artificial Sequence
  SARM1 targeting guide sequence portion
caggccguagguguacuggcg

SEQ ID NO: 9032 - RNA, 21 nt, Artificial Sequence
  SARM1 targeting guide sequence portion
caggcugcccagccaguccgc

SEQ ID NO: 9033 - RNA, 21 nt, Artificial Sequence
  SARM1 targeting guide sequence portion
cagggagcgguccaggccgca

SEQ ID NO: 9034 - RNA, 21 nt, Artificial Sequence
  SARM1 targeting guide sequence portion
cagguggaugccgcagucuuc

SEQ ID NO: 9035 - RNA, 21 nt, Artificial Sequence
  SARM1 targeting guide sequence portion
cagguucuuuagggagcucac

SEQ ID NO: 9036 - RNA, 21 nt, Artificial Sequence
  SARM1 targeting guide sequence portion
cagguugcugcggucgcacgu

SEQ ID NO: 9037 - RNA, 21 nt, Artificial Sequence
  SARM1 targeting guide sequence portion
caguacaccuacggccugguc

SEQ ID NO: 9038 - RNA, 21 nt, Artificial Sequence
  SARM1 targeting guide sequence portion
caguccgccagguugcugcgg

SEQ ID NO: 9039 - RNA, 21 nt, Artificial Sequence
  SARM1 targeting guide sequence portion
cagucuuccagcagcugcugc

SEQ ID NO: 9040 - RNA, 21 nt, Artificial Sequence
  SARM1 targeting guide sequence portion
cauccaccugggcgugcaccg

SEQ ID NO: 9041 - RNA, 21 nt, Artificial Sequence
  SARM1 targeting guide sequence portion
cauccucacggcggccagagg

SEQ ID NO: 9042 - RNA, 21 nt, Artificial Sequence
  SARM1 targeting guide sequence portion
ccaacuauucuacgugcgacc

SEQ ID NO: 9043 - RNA, 21 nt, Artificial Sequence
  SARM1 targeting guide sequence portion
ccaccugggcgugcaccgcgc

SEQ ID NO: 9044 - RNA, 21 nt, Artificial Sequence
  SARM1 targeting guide sequence portion
ccagcagcugcugcucagaca

SEQ ID NO: 9045 - RNA, 21 nt, Artificial Sequence
  SARM1 targeting guide sequence portion
ccagccaguccgccagguugc

SEQ ID NO: 9046 - RNA, 21 nt, Artificial Sequence
  SARM1 targeting guide sequence portion
ccaggccgcagcugaccaggc

SEQ ID NO: 9047 - RNA, 21 nt, Artificial Sequence
  SARM1 targeting guide sequence portion
ccaggccguagguguacuggc

SEQ ID NO: 9048 - RNA, 21 nt, Artificial Sequence
  SARM1 targeting guide sequence portion
ccaggcugcccagccaguccg

SEQ ID NO: 9049 - RNA, 21 nt, Artificial Sequence
  SARM1 targeting guide sequence portion
ccagguggaugccgcagucuu

SEQ ID NO: 9050 - RNA, 21 nt, Artificial Sequence
  SARM1 targeting guide sequence portion
ccagguugcugcggucgcacg

SEQ ID NO: 9051 - RNA, 21 nt, Artificial Sequence
  SARM1 targeting guide sequence portion
ccaguacaccuacggccuggu

SEQ ID NO: 9052 - RNA, 21 nt, Artificial Sequence
  SARM1 targeting guide sequence portion
ccaguccgccagguugcugcg

SEQ ID NO: 9053 - RNA, 21 nt, Artificial Sequence
  SARM1 targeting guide sequence portion
cccagccaguccgccagguug

SEQ ID NO: 9054 - RNA, 21 nt, Artificial Sequence
  SARM1 targeting guide sequence portion
cccagguggaugccgcagucu

SEQ ID NO: 9055 - RNA, 21 nt, Artificial Sequence
  SARM1 targeting guide sequence portion
cccgcauccucacggcggcca

SEQ ID NO: 9056 - RNA, 21 nt, Artificial Sequence
  SARM1 targeting guide sequence portion
cccgcgcuuccgccaguacac

SEQ ID NO: 9057 - RNA, 21 nt, Artificial Sequence
  SARM1 targeting guide sequence portion
cccugcugcaccgcgugucug

SEQ ID NO: 9058 - RNA, 21 nt, Artificial Sequence
  SARM1 targeting guide sequence portion
ccgcagcaaccuggcggacug

SEQ ID NO: 9059 - RNA, 21 nt, Artificial Sequence
  SARM1 targeting guide sequence portion
ccgcagcugaccaggccguag

SEQ ID NO: 9060 - RNA, 21 nt, Artificial Sequence
  SARM1 targeting guide sequence portion
ccgcagucuuccagcagcugc

SEQ ID NO: 9061 - RNA, 21 nt, Artificial Sequence
  SARM1 targeting guide sequence portion
ccgcauccucacggcggccag

SEQ ID NO: 9062 - RNA, 21 nt, Artificial Sequence
  SARM1 targeting guide sequence portion
ccgccagguugcugcggucgc

SEQ ID NO: 9063 - RNA, 21 nt, Artificial Sequence
  SARM1 targeting guide sequence portion
ccgccaguacaccuacggccu

SEQ ID NO: 9064 - RNA, 21 nt, Artificial Sequence
  SARM1 targeting guide sequence portion
ccgccgugaggaugcgggcgc

SEQ ID NO: 9065 - RNA, 21 nt, Artificial Sequence
  SARM1 targeting guide sequence portion
ccgcgcccgcauccucacggc

SEQ ID NO: 9066 - RNA, 21 nt, Artificial Sequence
  SARM1 targeting guide sequence portion
ccgcgcuuccgccaguacacc

SEQ ID NO: 9067 - RNA, 21 nt, Artificial Sequence
  SARM1 targeting guide sequence portion
ccgcgugucugagcagcagcu

SEQ ID NO: 9068 - RNA, 21 nt, Artificial Sequence
  SARM1 targeting guide sequence portion
ccgcucccugcugcaccgcgu

SEQ ID NO: 9069 - RNA, 21 nt, Artificial Sequence
  SARM1 targeting guide sequence portion
ccguagguguacuggcggaag

SEQ ID NO: 9070 - RNA, 21 nt, Artificial Sequence
  SARM1 targeting guide sequence portion
ccgugagcucccuaaagaacc

SEQ ID NO: 9071 - RNA, 21 nt, Artificial Sequence
  SARM1 targeting guide sequence portion
ccgugaggaugcgggcgcggu

SEQ ID NO: 9072 - RNA, 21 nt, Artificial Sequence
  SARM1 targeting guide sequence portion
ccuacggccuggucagcugcg

SEQ ID NO: 9073 - RNA, 21 nt, Artificial Sequence
  SARM1 targeting guide sequence portion
ccucuggccgccgugaggaug

SEQ ID NO: 9074 - RNA, 21 nt, Artificial Sequence
  SARM1 targeting guide sequence portion
ccugcugcaccgcgugucuga

SEQ ID NO: 9075 - RNA, 21 nt, Artificial Sequence
  SARM1 targeting guide sequence portion
ccuggacccgcgcuuccgcca

SEQ ID NO: 9076 - RNA, 21 nt, Artificial Sequence
  SARM1 targeting guide sequence portion
ccuggaccgcucccugcugca

SEQ ID NO: 9077 - RNA, 21 nt, Artificial Sequence
  SARM1 targeting guide sequence portion
ccuggcggacuggcugggcag

SEQ ID NO: 9078 - RNA, 21 nt, Artificial Sequence
  SARM1 targeting guide sequence portion
ccugggcgugcaccgcgcccg

SEQ ID NO: 9079 - RNA, 21 nt, Artificial Sequence
  SARM1 targeting guide sequence portion
ccuggucagcugcggccugga

SEQ ID NO: 9080 - RNA, 21 nt, Artificial Sequence
  SARM1 targeting guide sequence portion
ccuucgccaacuauucuacgu

SEQ ID NO: 9081 - RNA, 21 nt, Artificial Sequence
  SARM1 targeting guide sequence portion
cgaaggucuugagcuccguga

SEQ ID NO: 9082 - RNA, 21 nt, Artificial Sequence
  SARM1 targeting guide sequence portion
cgaccgcagcaaccuggcgga

SEQ ID NO: 9083 - RNA, 21 nt, Artificial Sequence
  SARM1 targeting guide sequence portion
cgcacguagaauaguuggcga

SEQ ID NO: 9084 - RNA, 21 nt, Artificial Sequence
  SARM1 targeting guide sequence portion
cgcagcaaccuggcggacugg

SEQ ID NO: 9085 - RNA, 21 nt, Artificial Sequence
  SARM1 targeting guide sequence portion
cgcagcugaccaggccguagg

SEQ ID NO: 9086 - RNA, 21 nt, Artificial Sequence
  SARM1 targeting guide sequence portion
cgcagucuuccagcagcugcu

SEQ ID NO: 9087 - RNA, 21 nt, Artificial Sequence
  SARM1 targeting guide sequence portion
cgcauccucacggcggccaga

SEQ ID NO: 9088 - RNA, 21 nt, Artificial Sequence
  SARM1 targeting guide sequence portion
cgccaacuauucuacgugcga

SEQ ID NO: 9089 - RNA, 21 nt, Artificial Sequence
  SARM1 targeting guide sequence portion
cgccagguugcugcggucgca

SEQ ID NO: 9090 - RNA, 21 nt, Artificial Sequence
  SARM1 targeting guide sequence portion
cgccaguacaccuacggccug

SEQ ID NO: 9091 - RNA, 21 nt, Artificial Sequence
  SARM1 targeting guide sequence portion
cgcccagguggaugccgcagu

SEQ ID NO: 9092 - RNA, 21 nt, Artificial Sequence
  SARM1 targeting guide sequence portion
cgcccgcauccucacggcggc

SEQ ID NO: 9093 - RNA, 21 nt, Artificial Sequence
  SARM1 targeting guide sequence portion
cgccgugaggaugcgggcgcg

SEQ ID NO: 9094 - RNA, 21 nt, Artificial Sequence
  SARM1 targeting guide sequence portion
cgcgcccgcauccucacggcg

SEQ ID NO: 9095 - RNA, 21 nt, Artificial Sequence
  SARM1 targeting guide sequence portion
cgcgcuuccgccaguacaccu

SEQ ID NO: 9096 - RNA, 21 nt, Artificial Sequence
  SARM1 targeting guide sequence portion
cgcggguccaggcugcccagc

SEQ ID NO: 9097 - RNA, 21 nt, Artificial Sequence
  SARM1 targeting guide sequence portion
cgcggugcacgcccaggugga

SEQ ID NO: 9098 - RNA, 21 nt, Artificial Sequence
  SARM1 targeting guide sequence portion
cgcggugcagcagggagcggu

SEQ ID NO: 9099 - RNA, 21 nt, Artificial Sequence
  SARM1 targeting guide sequence portion
cgcgugucugagcagcagcug

SEQ ID NO: 9100 - RNA, 21 nt, Artificial Sequence
  SARM1 targeting guide sequence portion
cgcucccugcugcaccgcgug

SEQ ID NO: 9101 - RNA, 21 nt, Artificial Sequence
  SARM1 targeting guide sequence portion
cgcuuccgccaguacaccuac

SEQ ID NO: 9102 - RNA, 21 nt, Artificial Sequence
  SARM1 targeting guide sequence portion
cggaagcgcggguccaggcug

SEQ ID NO: 9103 - RNA, 21 nt, Artificial Sequence
  SARM1 targeting guide sequence portion
cggacuggcugggcagccugg

SEQ ID NO: 9104 - RNA, 21 nt, Artificial Sequence
  SARM1 targeting guide sequence portion
cggagcucaagaccuucgcca

SEQ ID NO: 9105 - RNA, 21 nt, Artificial Sequence
  SARM1 targeting guide sequence portion
cggcauccaccugggcgugca

SEQ ID NO: 9106 - RNA, 21 nt, Artificial Sequence
  SARM1 targeting guide sequence portion
cggccuggaccgcucccugcu

SEQ ID NO: 9107 - RNA, 21 nt, Artificial Sequence
  SARM1 targeting guide sequence portion
cggccuggucagcugcggccu

SEQ ID NO: 9108 - RNA, 21 nt, Artificial Sequence
  SARM1 targeting guide sequence portion
cgggcgcggugcacgcccagg

SEQ ID NO: 9109 - RNA, 21 nt, Artificial Sequence
  SARM1 targeting guide sequence portion
cggguccaggcugcccagcca

SEQ ID NO: 9110 - RNA, 21 nt, Artificial Sequence
  SARM1 targeting guide sequence portion
cgguccaggccgcagcugacc

SEQ ID NO: 9111 - RNA, 21 nt, Artificial Sequence
  SARM1 targeting guide sequence portion
cggucgcacguagaauaguug

SEQ ID NO: 9112 - RNA, 21 nt, Artificial Sequence
  SARM1 targeting guide sequence portion
cggugcacgcccagguggaug

SEQ ID NO: 9113 - RNA, 21 nt, Artificial Sequence
  SARM1 targeting guide sequence portion
cggugcagcagggagcggucc

SEQ ID NO: 9114 - RNA, 21 nt, Artificial Sequence
  SARM1 targeting guide sequence portion
cguagaauaguuggcgaaggu

SEQ ID NO: 9115 - RNA, 21 nt, Artificial Sequence
  SARM1 targeting guide sequence portion
cguagguguacuggcggaagc

SEQ ID NO: 9116 - RNA, 21 nt, Artificial Sequence
  SARM1 targeting guide sequence portion
cgugaggaugcgggcgcggug

SEQ ID NO: 9117 - RNA, 21 nt, Artificial Sequence
  SARM1 targeting guide sequence portion
cgugcaccgcgcccgcauccu

SEQ ID NO: 9118 - RNA, 21 nt, Artificial Sequence
  SARM1 targeting guide sequence portion
cgugcgaccgcagcaaccugg

SEQ ID NO: 9119 - RNA, 21 nt, Artificial Sequence
  SARM1 targeting guide sequence portion
cgugucugagcagcagcugcu

SEQ ID NO: 9120 - RNA, 21 nt, Artificial Sequence
  SARM1 targeting guide sequence portion
cuacggccuggucagcugcgg

SEQ ID NO: 9121 - RNA, 21 nt, Artificial Sequence
  SARM1 targeting guide sequence portion
cuacgugcgaccgcagcaacc

SEQ ID NO: 9122 - RNA, 21 nt, Artificial Sequence
  SARM1 targeting guide sequence portion
cuauucuacgugcgaccgcag

SEQ ID NO: 9123 - RNA, 21 nt, Artificial Sequence
  SARM1 targeting guide sequence portion
cucaagaccuucgccaacuau

SEQ ID NO: 9124 - RNA, 21 nt, Artificial Sequence
  SARM1 targeting guide sequence portion
cucacggagcucaagaccuuc

SEQ ID NO: 9125 - RNA, 21 nt, Artificial Sequence
  SARM1 targeting guide sequence portion
cucagacacgcggugcagcag

SEQ ID NO: 9126 - RNA, 21 nt, Artificial Sequence
  SARM1 targeting guide sequence portion
cucccugcugcaccgcguguc

SEQ ID NO: 9127 - RNA, 21 nt, Artificial Sequence
  SARM1 targeting guide sequence portion
cuccgugagcucccuaaagaa

SEQ ID NO: 9128 - RNA, 21 nt, Artificial Sequence
  SARM1 targeting guide sequence portion
cucuggccgccgugaggaugc

SEQ ID NO: 9129 - RNA, 21 nt, Artificial Sequence
  SARM1 targeting guide sequence portion
cugaccaggccguagguguac

SEQ ID NO: 9130 - RNA, 21 nt, Artificial Sequence
  SARM1 targeting guide sequence portion
cugaccucuggccgccgugag

SEQ ID NO: 9131 - RNA, 21 nt, Artificial Sequence
  SARM1 targeting guide sequence portion
cugagcagcagcugcuggaag

SEQ ID NO: 9132 - RNA, 21 nt, Artificial Sequence
  SARM1 targeting guide sequence portion
cugcaccgcgugucugagcag

SEQ ID NO: 9133 - RNA, 21 nt, Artificial Sequence
  SARM1 targeting guide sequence portion
cugcccagccaguccgccagg

SEQ ID NO: 9134 - RNA, 21 nt, Artificial Sequence
  SARM1 targeting guide sequence portion
cugcggcauccaccugggcgu

SEQ ID NO: 9135 - RNA, 21 nt, Artificial Sequence
  SARM1 targeting guide sequence portion
cugcggccuggaccgcucccu

SEQ ID NO: 9136 - RNA, 21 nt, Artificial Sequence
  SARM1 targeting guide sequence portion
cugcggucgcacguagaauag

SEQ ID NO: 9137 - RNA, 21 nt, Artificial Sequence
  SARM1 targeting guide sequence portion
cugcucagacacgcggugcag

SEQ ID NO: 9138 - RNA, 21 nt, Artificial Sequence
  SARM1 targeting guide sequence portion
cugcugcaccgcgugucugag

SEQ ID NO: 9139 - RNA, 21 nt, Artificial Sequence
  SARM1 targeting guide sequence portion
cugcugcucagacacgcggug

SEQ ID NO: 9140 - RNA, 21 nt, Artificial Sequence
  SARM1 targeting guide sequence portion
cugcuggaagacugcggcauc

SEQ ID NO: 9141 - RNA, 21 nt, Artificial Sequence
  SARM1 targeting guide sequence portion
cuggaagacugcggcauccac

SEQ ID NO: 9142 - RNA, 21 nt, Artificial Sequence
  SARM1 targeting guide sequence portion
cuggacccgcgcuuccgccag

SEQ ID NO: 9143 - RNA, 21 nt, Artificial Sequence
  SARM1 targeting guide sequence portion
cuggaccgcucccugcugcac

SEQ ID NO: 9144 - RNA, 21 nt, Artificial Sequence
  SARM1 targeting guide sequence portion
cuggccgccgugaggaugcgg

SEQ ID NO: 9145 - RNA, 21 nt, Artificial Sequence
  SARM1 targeting guide sequence portion
cuggcggaagcgcggguccag

SEQ ID NO: 9146 - RNA, 21 nt, Artificial Sequence
  SARM1 targeting guide sequence portion
cuggcggacuggcugggcagc

SEQ ID NO: 9147 - RNA, 21 nt, Artificial Sequence
  SARM1 targeting guide sequence portion
cuggcugggcagccuggaccc

SEQ ID NO: 9148 - RNA, 21 nt, Artificial Sequence
  SARM1 targeting guide sequence portion
cugggcagccuggacccgcgc

SEQ ID NO: 9149 - RNA, 21 nt, Artificial Sequence
  SARM1 targeting guide sequence portion
cugggcgugcaccgcgcccgc

SEQ ID NO: 9150 - RNA, 21 nt, Artificial Sequence
  SARM1 targeting guide sequence portion
cuggucagcugcggccuggac

SEQ ID NO: 9151 - RNA, 21 nt, Artificial Sequence
  SARM1 targeting guide sequence portion
cuuccagcagcugcugcucag

SEQ ID NO: 9152 - RNA, 21 nt, Artificial Sequence
  SARM1 targeting guide sequence portion
cuuccgccaguacaccuacgg

SEQ ID NO: 9153 - RNA, 21 nt, Artificial Sequence
  SARM1 targeting guide sequence portion
cuucgccaacuauucuacgug

SEQ ID NO: 9154 - RNA, 21 nt, Artificial Sequence
  SARM1 targeting guide sequence portion
cuugagcuccgugagcucccu

SEQ ID NO: 9155 - RNA, 21 nt, Artificial Sequence
  SARM1 targeting guide sequence portion
cuuuagggagcucacggagcu

SEQ ID NO: 9156 - RNA, 21 nt, Artificial Sequence
  SARM1 targeting guide sequence portion
gaagacugcggcauccaccug

SEQ ID NO: 9157 - RNA, 21 nt, Artificial Sequence
  SARM1 targeting guide sequence portion
gaagcgcggguccaggcugcc

SEQ ID NO: 9158 - RNA, 21 nt, Artificial Sequence
  SARM1 targeting guide sequence portion
gaaggucuugagcuccgugag

SEQ ID NO: 9159 - RNA, 21 nt, Artificial Sequence
  SARM1 targeting guide sequence portion
gaauaguuggcgaaggucuug

SEQ ID NO: 9160 - RNA, 21 nt, Artificial Sequence
  SARM1 targeting guide sequence portion
gacacgcggugcagcagggag

SEQ ID NO: 9161 - RNA, 21 nt, Artificial Sequence
  SARM1 targeting guide sequence portion
gaccaggccguagguguacug

SEQ ID NO: 9162 - RNA, 21 nt, Artificial Sequence
  SARM1 targeting guide sequence portion
gacccgcgcuuccgccaguac

SEQ ID NO: 9163 - RNA, 21 nt, Artificial Sequence
  SARM1 targeting guide sequence portion
gaccgcagcaaccuggcggac

SEQ ID NO: 9164 - RNA, 21 nt, Artificial Sequence
  SARM1 targeting guide sequence portion
gaccgcucccugcugcaccgc

SEQ ID NO: 9165 - RNA, 21 nt, Artificial Sequence
  SARM1 targeting guide sequence portion
gaccucuggccgccgugagga

SEQ ID NO: 9166 - RNA, 21 nt, Artificial Sequence
  SARM1 targeting guide sequence portion
gaccuucgccaacuauucuac

SEQ ID NO: 9167 - RNA, 21 nt, Artificial Sequence
  SARM1 targeting guide sequence portion
gacugcggcauccaccugggc

SEQ ID NO: 9168 - RNA, 21 nt, Artificial Sequence
  SARM1 targeting guide sequence portion
gacuggcugggcagccuggac

SEQ ID NO: 9169 - RNA, 21 nt, Artificial Sequence
  SARM1 targeting guide sequence portion
gagcagcagcugcuggaagac

SEQ ID NO: 9170 - RNA, 21 nt, Artificial Sequence
  SARM1 targeting guide sequence portion
gagcgguccaggccgcagcug

SEQ ID NO: 9171 - RNA, 21 nt, Artificial Sequence
  SARM1 targeting guide sequence portion
gagcucaagaccuucgccaac

SEQ ID NO: 9172 - RNA, 21 nt, Artificial Sequence
  SARM1 targeting guide sequence portion
gagcucacggagcucaagacc

SEQ ID NO: 9173 - RNA, 21 nt, Artificial Sequence
  SARM1 targeting guide sequence portion
gagcuccgugagcucccuaaa

SEQ ID NO: 9174 - RNA, 21 nt, Artificial Sequence
  SARM1 targeting guide sequence portion
gaggaugcgggcgcggugcac

SEQ ID NO: 9175 - RNA, 21 nt, Artificial Sequence
  SARM1 targeting guide sequence portion
gaugccgcagucuuccagcag

SEQ ID NO: 9176 - RNA, 21 nt, Artificial Sequence
  SARM1 targeting guide sequence portion
gaugcgggcgcggugcacgcc

SEQ ID NO: 9177 - RNA, 21 nt, Artificial Sequence
  SARM1 targeting guide sequence portion
gcaaccuggcggacuggcugg

SEQ ID NO: 9178 - RNA, 21 nt, Artificial Sequence
  SARM1 targeting guide sequence portion
gcaccgcgcccgcauccucac

SEQ ID NO: 9179 - RNA, 21 nt, Artificial Sequence
  SARM1 targeting guide sequence portion
gcaccgcgugucugagcagca

SEQ ID NO: 9180 - RNA, 21 nt, Artificial Sequence
  SARM1 targeting guide sequence portion
gcacgcccagguggaugccgc

SEQ ID NO: 9181 - RNA, 21 nt, Artificial Sequence
  SARM1 targeting guide sequence portion
gcacguagaauaguuggcgaa

SEQ ID NO: 9182 - RNA, 21 nt, Artificial Sequence
  SARM1 targeting guide sequence portion
gcagcaaccuggcggacuggc

SEQ ID NO: 9183 - RNA, 21 nt, Artificial Sequence
  SARM1 targeting guide sequence portion
gcagcagcugcuggaagacug

SEQ ID NO: 9184 - RNA, 21 nt, Artificial Sequence
  SARM1 targeting guide sequence portion
gcagcagggagcgguccaggc

SEQ ID NO: 9185 - RNA, 21 nt, Artificial Sequence
  SARM1 targeting guide sequence portion
gcagccuggacccgcgcuucc

SEQ ID NO: 9186 - RNA, 21 nt, Artificial Sequence
  SARM1 targeting guide sequence portion
gcagcugaccaggccguaggu

SEQ ID NO: 9187 - RNA, 21 nt, Artificial Sequence
  SARM1 targeting guide sequence portion
gcagcugcugcucagacacgc

SEQ ID NO: 9188 - RNA, 21 nt, Artificial Sequence
  SARM1 targeting guide sequence portion
gcagcugcuggaagacugcgg

SEQ ID NO: 9189 - RNA, 21 nt, Artificial Sequence
  SARM1 targeting guide sequence portion
gcagggagcgguccaggccgc

SEQ ID NO: 9190 - RNA, 21 nt, Artificial Sequence
  SARM1 targeting guide sequence portion
gcagguucuuuagggagcuca

SEQ ID NO: 9191 - RNA, 21 nt, Artificial Sequence
  SARM1 targeting guide sequence portion
gcagucuuccagcagcugcug

SEQ ID NO: 9192 - RNA, 21 nt, Artificial Sequence
  SARM1 targeting guide sequence portion
gcauccaccugggcgugcacc

SEQ ID NO: 9193 - RNA, 21 nt, Artificial Sequence
  SARM1 targeting guide sequence portion
gcauccucacggcggccagag

SEQ ID NO: 9194 - RNA, 21 nt, Artificial Sequence
  SARM1 targeting guide sequence portion
gccaacuauucuacgugcgac

SEQ ID NO: 9195 - RNA, 21 nt, Artificial Sequence
  SARM1 targeting guide sequence portion
gccagguugcugcggucgcac

SEQ ID NO: 9196 - RNA, 21 nt, Artificial Sequence
  SARM1 targeting guide sequence portion
gccaguacaccuacggccugg

SEQ ID NO: 9197 - RNA, 21 nt, Artificial Sequence
  SARM1 targeting guide sequence portion
gccaguccgccagguugcugc

SEQ ID NO: 9198 - RNA, 21 nt, Artificial Sequence
  SARM1 targeting guide sequence portion
gcccagccaguccgccagguu

SEQ ID NO: 9199 - RNA, 21 nt, Artificial Sequence
  SARM1 targeting guide sequence portion
gcccagguggaugccgcaguc

SEQ ID NO: 9200 - RNA, 21 nt, Artificial Sequence
  SARM1 targeting guide sequence portion
gcccgcauccucacggcggcc

SEQ ID NO: 9201 - RNA, 21 nt, Artificial Sequence
  SARM1 targeting guide sequence portion
gccgcagcugaccaggccgua

SEQ ID NO: 9202 - RNA, 21 nt, Artificial Sequence
  SARM1 targeting guide sequence portion
gccgcagucuuccagcagcug

SEQ ID NO: 9203 - RNA, 21 nt, Artificial Sequence
  SARM1 targeting guide sequence portion
gccgccgugaggaugcgggcg

SEQ ID NO: 9204 - RNA, 21 nt, Artificial Sequence
  SARM1 targeting guide sequence portion
gccguagguguacuggcggaa

SEQ ID NO: 9205 - RNA, 21 nt, Artificial Sequence
  SARM1 targeting guide sequence portion
gccgugaggaugcgggcgcgg

SEQ ID NO: 9206 - RNA, 21 nt, Artificial Sequence
  SARM1 targeting guide sequence portion
gccuggacccgcgcuuccgcc

SEQ ID NO: 9207 - RNA, 21 nt, Artificial Sequence
  SARM1 targeting guide sequence portion
gccuggaccgcucccugcugc

SEQ ID NO: 9208 - RNA, 21 nt, Artificial Sequence
  SARM1 targeting guide sequence portion
gccuggucagcugcggccugg

SEQ ID NO: 9209 - RNA, 21 nt, Artificial Sequence
  SARM1 targeting guide sequence portion
gcgaaggucuugagcuccgug

SEQ ID NO: 9210 - RNA, 21 nt, Artificial Sequence
  SARM1 targeting guide sequence portion
gcgaccgcagcaaccuggcgg

SEQ ID NO: 9211 - RNA, 21 nt, Artificial Sequence
  SARM1 targeting guide sequence portion
gcgcccgcauccucacggcgg

SEQ ID NO: 9212 - RNA, 21 nt, Artificial Sequence
  SARM1 targeting guide sequence portion
gcgcggguccaggcugcccag

SEQ ID NO: 9213 - RNA, 21 nt, Artificial Sequence
  SARM1 targeting guide sequence portion
gcgcggugcacgcccaggugg

SEQ ID NO: 9214 - RNA, 21 nt, Artificial Sequence
  SARM1 targeting guide sequence portion
gcgcuuccgccaguacaccua

SEQ ID NO: 9215 - RNA, 21 nt, Artificial Sequence
  SARM1 targeting guide sequence portion
gcggaagcgcggguccaggcu

SEQ ID NO: 9216 - RNA, 21 nt, Artificial Sequence
  SARM1 targeting guide sequence portion
gcggacuggcugggcagccug

SEQ ID NO: 9217 - RNA, 21 nt, Artificial Sequence
  SARM1 targeting guide sequence portion
gcggcauccaccugggcgugc

SEQ ID NO: 9218 - RNA, 21 nt, Artificial Sequence
  SARM1 targeting guide sequence portion
gcggccuggaccgcucccugc

SEQ ID NO: 9219 - RNA, 21 nt, Artificial Sequence
  SARM1 targeting guide sequence portion
gcgggcgcggugcacgcccag

SEQ ID NO: 9220 - RNA, 21 nt, Artificial Sequence
  SARM1 targeting guide sequence portion
gcggguccaggcugcccagcc

SEQ ID NO: 9221 - RNA, 21 nt, Artificial Sequence
  SARM1 targeting guide sequence portion
gcgguccaggccgcagcugac

SEQ ID NO: 9222 - RNA, 21 nt, Artificial Sequence
  SARM1 targeting guide sequence portion
gcggucgcacguagaauaguu

SEQ ID NO: 9223 - RNA, 21 nt, Artificial Sequence
  SARM1 targeting guide sequence portion
gcggugcacgcccagguggau

SEQ ID NO: 9224 - RNA, 21 nt, Artificial Sequence
  SARM1 targeting guide sequence portion
gcggugcagcagggagcgguc

SEQ ID NO: 9225 - RNA, 21 nt, Artificial Sequence
  SARM1 targeting guide sequence portion
gcgugcaccgcgcccgcaucc

SEQ ID NO: 9226 - RNA, 21 nt, Artificial Sequence
  SARM1 targeting guide sequence portion
gcgugucugagcagcagcugc

SEQ ID NO: 9227 - RNA, 21 nt, Artificial Sequence
  SARM1 targeting guide sequence portion
gcucaagaccuucgccaacua

SEQ ID NO: 9228 - RNA, 21 nt, Artificial Sequence
  SARM1 targeting guide sequence portion
gcucacggagcucaagaccuu

SEQ ID NO: 9229 - RNA, 21 nt, Artificial Sequence
  SARM1 targeting guide sequence portion
gcucagacacgcggugcagca

SEQ ID NO: 9230 - RNA, 21 nt, Artificial Sequence
  SARM1 targeting guide sequence portion
gcucccugcugcaccgcgugu

SEQ ID NO: 9231 - RNA, 21 nt, Artificial Sequence
  SARM1 targeting guide sequence portion
gcuccgugagcucccuaaaga

SEQ ID NO: 9232 - RNA, 21 nt, Artificial Sequence
  SARM1 targeting guide sequence portion
gcugaccaggccguaggugua

SEQ ID NO: 9233 - RNA, 21 nt, Artificial Sequence
  SARM1 targeting guide sequence portion
gcugaccucuggccgccguga

SEQ ID NO: 9234 - RNA, 21 nt, Artificial Sequence
  SARM1 targeting guide sequence portion
gcugcaccgcgugucugagca

SEQ ID NO: 9235 - RNA, 21 nt, Artificial Sequence
  SARM1 targeting guide sequence portion
gcugcccagccaguccgccag

SEQ ID NO: 9236 - RNA, 21 nt, Artificial Sequence
  SARM1 targeting guide sequence portion
gcugcggccuggaccgcuccc

SEQ ID NO: 9237 - RNA, 21 nt, Artificial Sequence
  SARM1 targeting guide sequence portion
gcugcggucgcacguagaaua

SEQ ID NO: 9238 - RNA, 21 nt, Artificial Sequence
  SARM1 targeting guide sequence portion
gcugcucagacacgcggugca

SEQ ID NO: 9239 - RNA, 21 nt, Artificial Sequence
  SARM1 targeting guide sequence portion
gcugcugcucagacacgcggu

SEQ ID NO: 9240 - RNA, 21 nt, Artificial Sequence
  SARM1 targeting guide sequence portion
gcugcuggaagacugcggcau

SEQ ID NO: 9241 - RNA, 21 nt, Artificial Sequence
  SARM1 targeting guide sequence portion
gcuggaagacugcggcaucca

SEQ ID NO: 9242 - RNA, 21 nt, Artificial Sequence
  SARM1 targeting guide sequence portion
gcugggcagccuggacccgcg

SEQ ID NO: 9243 - RNA, 21 nt, Artificial Sequence
  SARM1 targeting guide sequence portion
gcuuccgccaguacaccuacg

SEQ ID NO: 9244 - RNA, 21 nt, Artificial Sequence
  SARM1 targeting guide sequence portion
ggaagacugcggcauccaccu

SEQ ID NO: 9245 - RNA, 21 nt, Artificial Sequence
  SARM1 targeting guide sequence portion
ggaagcgcggguccaggcugc

SEQ ID NO: 9246 - RNA, 21 nt, Artificial Sequence
  SARM1 targeting guide sequence portion
ggacccgcgcuuccgccagua

SEQ ID NO: 9247 - RNA, 21 nt, Artificial Sequence
  SARM1 targeting guide sequence portion
ggaccgcucccugcugcaccg

SEQ ID NO: 9248 - RNA, 21 nt, Artificial Sequence
  SARM1 targeting guide sequence portion
ggacuggcugggcagccugga

SEQ ID NO: 9249 - RNA, 21 nt, Artificial Sequence
  SARM1 targeting guide sequence portion
ggagcgguccaggccgcagcu

SEQ ID NO: 9250 - RNA, 21 nt, Artificial Sequence
  SARM1 targeting guide sequence portion
ggagcucaagaccuucgccaa

SEQ ID NO: 9251 - RNA, 21 nt, Artificial Sequence
  SARM1 targeting guide sequence portion
ggagcucacggagcucaagac

SEQ ID NO: 9252 - RNA, 21 nt, Artificial Sequence
  SARM1 targeting guide sequence portion
ggaugccgcagucuuccagca

SEQ ID NO: 9253 - RNA, 21 nt, Artificial Sequence
  SARM1 targeting guide sequence portion
ggaugcgggcgcggugcacgc

SEQ ID NO: 9254 - RNA, 21 nt, Artificial Sequence
  SARM1 targeting guide sequence portion
ggcagccuggacccgcgcuuc

SEQ ID NO: 9255 - RNA, 21 nt, Artificial Sequence
  SARM1 targeting guide sequence portion
ggcauccaccugggcgugcac

SEQ ID NO: 9256 - RNA, 21 nt, Artificial Sequence
  SARM1 targeting guide sequence portion
ggccgcagcugaccaggccgu

SEQ ID NO: 9257 - RNA, 21 nt, Artificial Sequence
  SARM1 targeting guide sequence portion
ggccgccgugaggaugcgggc

SEQ ID NO: 9258 - RNA, 21 nt, Artificial Sequence
  SARM1 targeting guide sequence portion
ggccguagguguacuggcgga

SEQ ID NO: 9259 - RNA, 21 nt, Artificial Sequence
  SARM1 targeting guide sequence portion
ggccuggaccgcucccugcug

SEQ ID NO: 9260 - RNA, 21 nt, Artificial Sequence
  SARM1 targeting guide sequence portion
ggccuggucagcugcggccug

SEQ ID NO: 9261 - RNA, 21 nt, Artificial Sequence
  SARM1 targeting guide sequence portion
ggcgaaggucuugagcuccgu

SEQ ID NO: 9262 - RNA, 21 nt, Artificial Sequence
  SARM1 targeting guide sequence portion
ggcgcggugcacgcccaggug

SEQ ID NO: 9263 - RNA, 21 nt, Artificial Sequence
  SARM1 targeting guide sequence portion
ggcggaagcgcggguccaggc

SEQ ID NO: 9264 - RNA, 21 nt, Artificial Sequence
  SARM1 targeting guide sequence portion
ggcggacuggcugggcagccu

SEQ ID NO: 9265 - RNA, 21 nt, Artificial Sequence
  SARM1 targeting guide sequence portion
ggcgugcaccgcgcccgcauc

SEQ ID NO: 9266 - RNA, 21 nt, Artificial Sequence
  SARM1 targeting guide sequence portion
ggcugaccucuggccgccgug

SEQ ID NO: 9267 - RNA, 21 nt, Artificial Sequence
  SARM1 targeting guide sequence portion
ggcugcccagccaguccgcca

SEQ ID NO: 9268 - RNA, 21 nt, Artificial Sequence
  SARM1 targeting guide sequence portion
ggcugggcagccuggacccgc

SEQ ID NO: 9269 - RNA, 21 nt, Artificial Sequence
  SARM1 targeting guide sequence portion
gggagcgguccaggccgcagc

SEQ ID NO: 9270 - RNA, 21 nt, Artificial Sequence
  SARM1 targeting guide sequence portion
gggagcucacggagcucaaga

SEQ ID NO: 9271 - RNA, 21 nt, Artificial Sequence
  SARM1 targeting guide sequence portion
gggcagccuggacccgcgcuu

SEQ ID NO: 9272 - RNA, 21 nt, Artificial Sequence
  SARM1 targeting guide sequence portion
gggcgcggugcacgcccaggu

SEQ ID NO: 9273 - RNA, 21 nt, Artificial Sequence
  SARM1 targeting guide sequence portion
gggcgugcaccgcgcccgcau

SEQ ID NO: 9274 - RNA, 21 nt, Artificial Sequence
  SARM1 targeting guide sequence portion
ggguccaggcugcccagccag

SEQ ID NO: 9275 - RNA, 21 nt, Artificial Sequence
  SARM1 targeting guide sequence portion
ggucagcugcggccuggaccg

SEQ ID NO: 9276 - RNA, 21 nt, Artificial Sequence
  SARM1 targeting guide sequence portion
gguccaggccgcagcugacca

SEQ ID NO: 9277 - RNA, 21 nt, Artificial Sequence
  SARM1 targeting guide sequence portion
gguccaggcugcccagccagu

SEQ ID NO: 9278 - RNA, 21 nt, Artificial Sequence
  SARM1 targeting guide sequence portion
ggucgcacguagaauaguugg

SEQ ID NO: 9279 - RNA, 21 nt, Artificial Sequence
  SARM1 targeting guide sequence portion
ggucuugagcuccgugagcuc

SEQ ID NO: 9280 - RNA, 21 nt, Artificial Sequence
  SARM1 targeting guide sequence portion
ggugcacgcccagguggaugc

SEQ ID NO: 9281 - RNA, 21 nt, Artificial Sequence
  SARM1 targeting guide sequence portion
ggugcagcagggagcggucca

SEQ ID NO: 9282 - RNA, 21 nt, Artificial Sequence
  SARM1 targeting guide sequence portion
ggugcagguucuuuagggagc

SEQ ID NO: 9283 - RNA, 21 nt, Artificial Sequence
  SARM1 targeting guide sequence portion
gguggaugccgcagucuucca

SEQ ID NO: 9284 - RNA, 21 nt, Artificial Sequence
  SARM1 targeting guide sequence portion
gguguacuggcggaagcgcgg

SEQ ID NO: 9285 - RNA, 21 nt, Artificial Sequence
  SARM1 targeting guide sequence portion
gguucuuuagggagcucacgg

SEQ ID NO: 9286 - RNA, 21 nt, Artificial Sequence
  SARM1 targeting guide sequence portion
gguugcugcggucgcacguag

SEQ ID NO: 9287 - RNA, 21 nt, Artificial Sequence
  SARM1 targeting guide sequence portion
guacaccuacggccuggucag

SEQ ID NO: 9288 - RNA, 21 nt, Artificial Sequence
  SARM1 targeting guide sequence portion
guacuggcggaagcgcggguc

SEQ ID NO: 9289 - RNA, 21 nt, Artificial Sequence
  SARM1 targeting guide sequence portion
guagaauaguuggcgaagguc

SEQ ID NO: 9290 - RNA, 21 nt, Artificial Sequence
  SARM1 targeting guide sequence portion
guagguguacuggcggaagcg

SEQ ID NO: 9291 - RNA, 21 nt, Artificial Sequence
  SARM1 targeting guide sequence portion
gucagcugcggccuggaccgc

SEQ ID NO: 9292 - RNA, 21 nt, Artificial Sequence
  SARM1 targeting guide sequence portion
guccaggccgcagcugaccag

SEQ ID NO: 9293 - RNA, 21 nt, Artificial Sequence
  SARM1 targeting guide sequence portion
guccaggcugcccagccaguc

SEQ ID NO: 9294 - RNA, 21 nt, Artificial Sequence
  SARM1 targeting guide sequence portion
guccgccagguugcugcgguc

SEQ ID NO: 9295 - RNA, 21 nt, Artificial Sequence
  SARM1 targeting guide sequence portion
gucgcacguagaauaguuggc

SEQ ID NO: 9296 - RNA, 21 nt, Artificial Sequence
  SARM1 targeting guide sequence portion
gucugagcagcagcugcugga

SEQ ID NO: 9297 - RNA, 21 nt, Artificial Sequence
  SARM1 targeting guide sequence portion
gucuuccagcagcugcugcuc

SEQ ID NO: 9298 - RNA, 21 nt, Artificial Sequence
  SARM1 targeting guide sequence portion
gucuugagcuccgugagcucc

SEQ ID NO: 9299 - RNA, 21 nt, Artificial Sequence
  SARM1 targeting guide sequence portion
gugaggaugcgggcgcggugc

SEQ ID NO: 9300 - RNA, 21 nt, Artificial Sequence
  SARM1 targeting guide sequence portion
gugcaccgcgcccgcauccuc

SEQ ID NO: 9301 - RNA, 21 nt, Artificial Sequence
  SARM1 targeting guide sequence portion
gugcacgcccagguggaugcc

SEQ ID NO: 9302 - RNA, 21 nt, Artificial Sequence
  SARM1 targeting guide sequence portion
gugcagcagggagcgguccag

SEQ ID NO: 9303 - RNA, 21 nt, Artificial Sequence
  SARM1 targeting guide sequence portion
gugcagguucuuuagggagcu

SEQ ID NO: 9304 - RNA, 21 nt, Artificial Sequence
  SARM1 targeting guide sequence portion
gugcgaccgcagcaaccuggc

SEQ ID NO: 9305 - RNA, 21 nt, Artificial Sequence
  SARM1 targeting guide sequence portion
guggaugccgcagucuuccag

SEQ ID NO: 9306 - RNA, 21 nt, Artificial Sequence
  SARM1 targeting guide sequence portion
guguacuggcggaagcgcggg

SEQ ID NO: 9307 - RNA, 21 nt, Artificial Sequence
  SARM1 targeting guide sequence portion
gugucugagcagcagcugcug

SEQ ID NO: 9308 - RNA, 21 nt, Artificial Sequence
  SARM1 targeting guide sequence portion
guucuuuagggagcucacgga

SEQ ID NO: 9309 - RNA, 21 nt, Artificial Sequence
  SARM1 targeting guide sequence portion
guugcugcggucgcacguaga

SEQ ID NO: 9310 - RNA, 21 nt, Artificial Sequence
  SARM1 targeting guide sequence portion
guuggcgaaggucuugagcuc

SEQ ID NO: 9311 - RNA, 21 nt, Artificial Sequence
  SARM1 targeting guide sequence portion
uacaccuacggccuggucagc

SEQ ID NO: 9312 - RNA, 21 nt, Artificial Sequence
  SARM1 targeting guide sequence portion
uacggccuggucagcugcggc

SEQ ID NO: 9313 - RNA, 21 nt, Artificial Sequence
  SARM1 targeting guide sequence portion
uacgugcgaccgcagcaaccu

SEQ ID NO: 9314 - RNA, 21 nt, Artificial Sequence
  SARM1 targeting guide sequence portion
uacuggcggaagcgcgggucc

SEQ ID NO: 9315 - RNA, 21 nt, Artificial Sequence
  SARM1 targeting guide sequence portion
uagaauaguuggcgaaggucu

SEQ ID NO: 9316 - RNA, 21 nt, Artificial Sequence
  SARM1 targeting guide sequence portion
uagggagcucacggagcucaa

SEQ ID NO: 9317 - RNA, 21 nt, Artificial Sequence
  SARM1 targeting guide sequence portion
uagguguacuggcggaagcgc

SEQ ID NO: 9318 - RNA, 21 nt, Artificial Sequence
  SARM1 targeting guide sequence portion
uaguuggcgaaggucuugagc

SEQ ID NO: 9319 - RNA, 21 nt, Artificial Sequence
  SARM1 targeting guide sequence portion
uauucuacgugcgaccgcagc

SEQ ID NO: 9320 - RNA, 21 nt, Artificial Sequence
  SARM1 targeting guide sequence portion
ucaagaccuucgccaacuauu

SEQ ID NO: 9321 - RNA, 21 nt, Artificial Sequence
  SARM1 targeting guide sequence portion
ucacggagcucaagaccuucg

SEQ ID NO: 9322 - RNA, 21 nt, Artificial Sequence
  SARM1 targeting guide sequence portion
ucagacacgcggugcagcagg

SEQ ID NO: 9323 - RNA, 21 nt, Artificial Sequence
  SARM1 targeting guide sequence portion
ucagcugcggccuggaccgcu

SEQ ID NO: 9324 - RNA, 21 nt, Artificial Sequence
  SARM1 targeting guide sequence portion
uccaccugggcgugcaccgcg

SEQ ID NO: 9325 - RNA, 21 nt, Artificial Sequence
  SARM1 targeting guide sequence portion
uccagcagcugcugcucagac

SEQ ID NO: 9326 - RNA, 21 nt, Artificial Sequence
  SARM1 targeting guide sequence portion
uccaggccgcagcugaccagg

SEQ ID NO: 9327 - RNA, 21 nt, Artificial Sequence
  SARM1 targeting guide sequence portion
uccaggcugcccagccagucc

SEQ ID NO: 9328 - RNA, 21 nt, Artificial Sequence
  SARM1 targeting guide sequence portion
ucccugcugcaccgcgugucu

SEQ ID NO: 9329 - RNA, 21 nt, Artificial Sequence
  SARM1 targeting guide sequence portion
uccgccagguugcugcggucg

SEQ ID NO: 9330 - RNA, 21 nt, Artificial Sequence
  SARM1 targeting guide sequence portion
uccgccaguacaccuacggcc

SEQ ID NO: 9331 - RNA, 21 nt, Artificial Sequence
  SARM1 targeting guide sequence portion
uccgugagcucccuaaagaac

SEQ ID NO: 9332 - RNA, 21 nt, Artificial Sequence
  SARM1 targeting guide sequence portion
ucgcacguagaauaguuggcg

SEQ ID NO: 9333 - RNA, 21 nt, Artificial Sequence
  SARM1 targeting guide sequence portion
ucgccaacuauucuacgugcg

SEQ ID NO: 9334 - RNA, 21 nt, Artificial Sequence
  SARM1 targeting guide sequence portion
ucuacgugcgaccgcagcaac

SEQ ID NO: 9335 - RNA, 21 nt, Artificial Sequence
  SARM1 targeting guide sequence portion
ucugagcagcagcugcuggaa

SEQ ID NO: 9336 - RNA, 21 nt, Artificial Sequence
  SARM1 targeting guide sequence portion
ucuggccgccgugaggaugcg

SEQ ID NO: 9337 - RNA, 21 nt, Artificial Sequence
  SARM1 targeting guide sequence portion
ucuuccagcagcugcugcuca

SEQ ID NO: 9338 - RNA, 21 nt, Artificial Sequence
  SARM1 targeting guide sequence portion
ucuugagcuccgugagcuccc

SEQ ID NO: 9339 - RNA, 21 nt, Artificial Sequence
  SARM1 targeting guide sequence portion
ucuuuagggagcucacggagc

SEQ ID NO: 9340 - RNA, 21 nt, Artificial Sequence
  SARM1 targeting guide sequence portion
ugaccaggccguagguguacu

SEQ ID NO: 9341 - RNA, 21 nt, Artificial Sequence
  SARM1 targeting guide sequence portion
ugaccucuggccgccgugagg

SEQ ID NO: 9342 - RNA, 21 nt, Artificial Sequence
  SARM1 targeting guide sequence portion
ugagcagcagcugcuggaaga

SEQ ID NO: 9343 - RNA, 21 nt, Artificial Sequence
  SARM1 targeting guide sequence portion
ugagcuccgugagcucccuaa

SEQ ID NO: 9344 - RNA, 21 nt, Artificial Sequence
  SARM1 targeting guide sequence portion
ugaggaugcgggcgcggugca

SEQ ID NO: 9345 - RNA, 21 nt, Artificial Sequence
  SARM1 targeting guide sequence portion
ugcaccgcgcccgcauccuca

SEQ ID NO: 9346 - RNA, 21 nt, Artificial Sequence
  SARM1 targeting guide sequence portion
ugcaccgcgugucugagcagc

SEQ ID NO: 9347 - RNA, 21 nt, Artificial Sequence
  SARM1 targeting guide sequence portion
ugcacgcccagguggaugccg

SEQ ID NO: 9348 - RNA, 21 nt, Artificial Sequence
  SARM1 targeting guide sequence portion
ugcagcagggagcgguccagg

SEQ ID NO: 9349 - RNA, 21 nt, Artificial Sequence
  SARM1 targeting guide sequence portion
ugcagguucuuuagggagcuc

SEQ ID NO: 9350 - RNA, 21 nt, Artificial Sequence
  SARM1 targeting guide sequence portion
ugcccagccaguccgccaggu

SEQ ID NO: 9351 - RNA, 21 nt, Artificial Sequence
  SARM1 targeting guide sequence portion
ugccgcagucuuccagcagcu

SEQ ID NO: 9352 - RNA, 21 nt, Artificial Sequence
  SARM1 targeting guide sequence portion
ugcgaccgcagcaaccuggcg

SEQ ID NO: 9353 - RNA, 21 nt, Artificial Sequence
  SARM1 targeting guide sequence portion
ugcggcauccaccugggcgug

SEQ ID NO: 9354 - RNA, 21 nt, Artificial Sequence
  SARM1 targeting guide sequence portion
ugcggccuggaccgcucccug

SEQ ID NO: 9355 - RNA, 21 nt, Artificial Sequence
  SARM1 targeting guide sequence portion
ugcgggcgcggugcacgccca

SEQ ID NO: 9356 - RNA, 21 nt, Artificial Sequence
  SARM1 targeting guide sequence portion
ugcggucgcacguagaauagu

SEQ ID NO: 9357 - RNA, 21 nt, Artificial Sequence
  SARM1 targeting guide sequence portion
ugcucagacacgcggugcagc

SEQ ID NO: 9358 - RNA, 21 nt, Artificial Sequence
  SARM1 targeting guide sequence portion
ugcugcaccgcgugucugagc

SEQ ID NO: 9359 - RNA, 21 nt, Artificial Sequence
  SARM1 targeting guide sequence portion
ugcugcggucgcacguagaau

SEQ ID NO: 9360 - RNA, 21 nt, Artificial Sequence
  SARM1 targeting guide sequence portion
ugcugcucagacacgcggugc

SEQ ID NO: 9361 - RNA, 21 nt, Artificial Sequence
  SARM1 targeting guide sequence portion
ugcuggaagacugcggcaucc

SEQ ID NO: 9362 - RNA, 21 nt, Artificial Sequence
  SARM1 targeting guide sequence portion
uggaagacugcggcauccacc

SEQ ID NO: 9363 - RNA, 21 nt, Artificial Sequence
  SARM1 targeting guide sequence portion
uggacccgcgcuuccgccagu

SEQ ID NO: 9364 - RNA, 21 nt, Artificial Sequence
  SARM1 targeting guide sequence portion
uggaccgcucccugcugcacc

SEQ ID NO: 9365 - RNA, 21 nt, Artificial Sequence
  SARM1 targeting guide sequence portion
uggaugccgcagucuuccagc

SEQ ID NO: 9366 - RNA, 21 nt, Artificial Sequence
  SARM1 targeting guide sequence portion
uggccgccgugaggaugcggg

SEQ ID NO: 9367 - RNA, 21 nt, Artificial Sequence
  SARM1 targeting guide sequence portion
uggcgaaggucuugagcuccg

SEQ ID NO: 9368 - RNA, 21 nt, Artificial Sequence
  SARM1 targeting guide sequence portion
uggcggaagcgcggguccagg

SEQ ID NO: 9369 - RNA, 21 nt, Artificial Sequence
  SARM1 targeting guide sequence portion
uggcggacuggcugggcagcc

SEQ ID NO: 9370 - RNA, 21 nt, Artificial Sequence
  SARM1 targeting guide sequence portion
uggcugggcagccuggacccg

SEQ ID NO: 9371 - RNA, 21 nt, Artificial Sequence
  SARM1 targeting guide sequence portion
ugggcagccuggacccgcgcu

SEQ ID NO: 9372 - RNA, 21 nt, Artificial Sequence
  SARM1 targeting guide sequence portion
ugggcgugcaccgcgcccgca

SEQ ID NO: 9373 - RNA, 21 nt, Artificial Sequence
  SARM1 targeting guide sequence portion
uggucagcugcggccuggacc

SEQ ID NO: 9374 - RNA, 21 nt, Artificial Sequence
  SARM1 targeting guide sequence portion
uguacuggcggaagcgcgggu

SEQ ID NO: 9375 - RNA, 21 nt, Artificial Sequence
  SARM1 targeting guide sequence portion
ugucugagcagcagcugcugg

SEQ ID NO: 9376 - RNA, 21 nt, Artificial Sequence
  SARM1 targeting guide sequence portion
uuagggagcucacggagcuca

SEQ ID NO: 9377 - RNA, 21 nt, Artificial Sequence
  SARM1 targeting guide sequence portion
uuccagcagcugcugcucaga

SEQ ID NO: 9378 - RNA, 21 nt, Artificial Sequence
  SARM1 targeting guide sequence portion
uuccgccaguacaccuacggc

SEQ ID NO: 9379 - RNA, 21 nt, Artificial Sequence
  SARM1 targeting guide sequence portion
uucgccaacuauucuacgugc

SEQ ID NO: 9380 - RNA, 21 nt, Artificial Sequence
  SARM1 targeting guide sequence portion
uucuacgugcgaccgcagcaa

SEQ ID NO: 9381 - RNA, 21 nt, Artificial Sequence
  SARM1 targeting guide sequence portion
uucuuuagggagcucacggag

SEQ ID NO: 9382 - RNA, 21 nt, Artificial Sequence
  SARM1 targeting guide sequence portion
uugagcuccgugagcucccua

SEQ ID NO: 9383 - RNA, 21 nt, Artificial Sequence
  SARM1 targeting guide sequence portion
uugcugcggucgcacguagaa

SEQ ID NO: 9384 - RNA, 21 nt, Artificial Sequence
  SARM1 targeting guide sequence portion
uuggcgaaggucuugagcucc

SEQ ID NO: 9385 - RNA, 21 nt, Artificial Sequence
  SARM1 targeting guide sequence portion
uuuagggagcucacggagcuc

SEQ ID NO: 9386 - RNA, 22 nt, Artificial Sequence
  SARM1 targeting guide sequence portion
aaccuggcggacuggcugggca

SEQ ID NO: 9387 - RNA, 22 nt, Artificial Sequence
  SARM1 targeting guide sequence portion
aacuauucuacgugcgaccgca

SEQ ID NO: 9388 - RNA, 22 nt, Artificial Sequence
  SARM1 targeting guide sequence portion
aagaccuucgccaacuauucua

SEQ ID NO: 9389 - RNA, 22 nt, Artificial Sequence
  SARM1 targeting guide sequence portion
aagacugcggcauccaccuggg

SEQ ID NO: 9390 - RNA, 22 nt, Artificial Sequence
  SARM1 targeting guide sequence portion
aagcgcggguccaggcugccca

SEQ ID NO: 9391 - RNA, 22 nt, Artificial Sequence
  SARM1 targeting guide sequence portion
aaggucuugagcuccgugagcu

SEQ ID NO: 9392 - RNA, 22 nt, Artificial Sequence
  SARM1 targeting guide sequence portion
aauaguuggcgaaggucuugag

SEQ ID NO: 9393 - RNA, 22 nt, Artificial Sequence
  SARM1 targeting guide sequence portion
acaccuacggccuggucagcug

SEQ ID NO: 9394 - RNA, 22 nt, Artificial Sequence
  SARM1 targeting guide sequence portion
acacgcggugcagcagggagcg

SEQ ID NO: 9395 - RNA, 22 nt, Artificial Sequence
  SARM1 targeting guide sequence portion
accaggccguagguguacuggc

SEQ ID NO: 9396 - RNA, 22 nt, Artificial Sequence
  SARM1 targeting guide sequence portion
acccgcgcuuccgccaguacac

SEQ ID NO: 9397 - RNA, 22 nt, Artificial Sequence
  SARM1 targeting guide sequence portion
accgcagcaaccuggcggacug

SEQ ID NO: 9398 - RNA, 22 nt, Artificial Sequence
  SARM1 targeting guide sequence portion
accgcgcccgcauccucacggc

SEQ ID NO: 9399 - RNA, 22 nt, Artificial Sequence
  SARM1 targeting guide sequence portion
accgcgugucugagcagcagcu

SEQ ID NO: 9400 - RNA, 22 nt, Artificial Sequence
  SARM1 targeting guide sequence portion
accgcucccugcugcaccgcgu

SEQ ID NO: 9401 - RNA, 22 nt, Artificial Sequence
  SARM1 targeting guide sequence portion
accuacggccuggucagcugcg

SEQ ID NO: 9402 - RNA, 22 nt, Artificial Sequence
  SARM1 targeting guide sequence portion
accucuggccgccgugaggaug

SEQ ID NO: 9403 - RNA, 22 nt, Artificial Sequence
  SARM1 targeting guide sequence portion
accuggcggacuggcugggcag

SEQ ID NO: 9404 - RNA, 22 nt, Artificial Sequence
  SARM1 targeting guide sequence portion
accugggcgugcaccgcgcccg

SEQ ID NO: 9405 - RNA, 22 nt, Artificial Sequence
  SARM1 targeting guide sequence portion
accuucgccaacuauucuacgu

SEQ ID NO: 9406 - RNA, 22 nt, Artificial Sequence
  SARM1 targeting guide sequence portion
acgcccagguggaugccgcagu

SEQ ID NO: 9407 - RNA, 22 nt, Artificial Sequence
  SARM1 targeting guide sequence portion
acgcggugcagcagggagcggu

SEQ ID NO: 9408 - RNA, 22 nt, Artificial Sequence
  SARM1 targeting guide sequence portion
acggagcucaagaccuucgcca

SEQ ID NO: 9409 - RNA, 22 nt, Artificial Sequence
  SARM1 targeting guide sequence portion
acggccuggucagcugcggccu

SEQ ID NO: 9410 - RNA, 22 nt, Artificial Sequence
  SARM1 targeting guide sequence portion
acguagaauaguuggcgaaggu

SEQ ID NO: 9411 - RNA, 22 nt, Artificial Sequence
  SARM1 targeting guide sequence portion
acgugcgaccgcagcaaccugg

SEQ ID NO: 9412 - RNA, 22 nt, Artificial Sequence
  SARM1 targeting guide sequence portion
acuauucuacgugcgaccgcag

SEQ ID NO: 9413 - RNA, 22 nt, Artificial Sequence
  SARM1 targeting guide sequence portion
acugcggcauccaccugggcgu

SEQ ID NO: 9414 - RNA, 22 nt, Artificial Sequence
  SARM1 targeting guide sequence portion
acuggcggaagcgcggguccag

SEQ ID NO: 9415 - RNA, 22 nt, Artificial Sequence
  SARM1 targeting guide sequence portion
acuggcugggcagccuggaccc

SEQ ID NO: 9416 - RNA, 22 nt, Artificial Sequence
  SARM1 targeting guide sequence portion
agaauaguuggcgaaggucuug

SEQ ID NO: 9417 - RNA, 22 nt, Artificial Sequence
  SARM1 targeting guide sequence portion
agacacgcggugcagcagggag

SEQ ID NO: 9418 - RNA, 22 nt, Artificial Sequence
  SARM1 targeting guide sequence portion
agaccuucgccaacuauucuac

SEQ ID NO: 9419 - RNA, 22 nt, Artificial Sequence
  SARM1 targeting guide sequence portion
agacugcggcauccaccugggc

SEQ ID NO: 9420 - RNA, 22 nt, Artificial Sequence
  SARM1 targeting guide sequence portion
agcaaccuggcggacuggcugg

SEQ ID NO: 9421 - RNA, 22 nt, Artificial Sequence
  SARM1 targeting guide sequence portion
agcagcagcugcuggaagacug

SEQ ID NO: 9422 - RNA, 22 nt, Artificial Sequence
  SARM1 targeting guide sequence portion
agcagcugcugcucagacacgc

SEQ ID NO: 9423 - RNA, 22 nt, Artificial Sequence
  SARM1 targeting guide sequence portion
agcagcugcuggaagacugcgg

SEQ ID NO: 9424 - RNA, 22 nt, Artificial Sequence
  SARM1 targeting guide sequence portion
agcagggagcgguccaggccgc

SEQ ID NO: 9425 - RNA, 22 nt, Artificial Sequence
  SARM1 targeting guide sequence portion
agccaguccgccagguugcugc

SEQ ID NO: 9426 - RNA, 22 nt, Artificial Sequence
  SARM1 targeting guide sequence portion
agccuggacccgcgcuuccgcc

SEQ ID NO: 9427 - RNA, 22 nt, Artificial Sequence
  SARM1 targeting guide sequence portion
agcgcggguccaggcugcccag

SEQ ID NO: 9428 - RNA, 22 nt, Artificial Sequence
  SARM1 targeting guide sequence portion
agcgguccaggccgcagcugac

SEQ ID NO: 9429 - RNA, 22 nt, Artificial Sequence
  SARM1 targeting guide sequence portion
agcucaagaccuucgccaacua

SEQ ID NO: 9430 - RNA, 22 nt, Artificial Sequence
  SARM1 targeting guide sequence portion
agcucacggagcucaagaccuu

SEQ ID NO: 9431 - RNA, 22 nt, Artificial Sequence
  SARM1 targeting guide sequence portion
agcuccgugagcucccuaaaga

SEQ ID NO: 9432 - RNA, 22 nt, Artificial Sequence
  SARM1 targeting guide sequence portion
agcugaccaggccguaggugua

SEQ ID NO: 9433 - RNA, 22 nt, Artificial Sequence
  SARM1 targeting guide sequence portion
agcugcggccuggaccgcuccc

SEQ ID NO: 9434 - RNA, 22 nt, Artificial Sequence
  SARM1 targeting guide sequence portion
agcugcugcucagacacgcggu

SEQ ID NO: 9435 - RNA, 22 nt, Artificial Sequence
  SARM1 targeting guide sequence portion
agcugcuggaagacugcggcau

SEQ ID NO: 9436 - RNA, 22 nt, Artificial Sequence
  SARM1 targeting guide sequence portion
aggaugcgggcgcggugcacgc

SEQ ID NO: 9437 - RNA, 22 nt, Artificial Sequence
  SARM1 targeting guide sequence portion
aggccgcagcugaccaggccgu

SEQ ID NO: 9438 - RNA, 22 nt, Artificial Sequence
  SARM1 targeting guide sequence portion
aggccguagguguacuggcgga

SEQ ID NO: 9439 - RNA, 22 nt, Artificial Sequence
  SARM1 targeting guide sequence portion
aggcugcccagccaguccgcca

SEQ ID NO: 9440 - RNA, 22 nt, Artificial Sequence
  SARM1 targeting guide sequence portion
agggagcgguccaggccgcagc

SEQ ID NO: 9441 - RNA, 22 nt, Artificial Sequence
  SARM1 targeting guide sequence portion
agggagcucacggagcucaaga

SEQ ID NO: 9442 - RNA, 22 nt, Artificial Sequence
  SARM1 targeting guide sequence portion
aggucuugagcuccgugagcuc

SEQ ID NO: 9443 - RNA, 22 nt, Artificial Sequence
  SARM1 targeting guide sequence portion
agguggaugccgcagucuucca

SEQ ID NO: 9444 - RNA, 22 nt, Artificial Sequence
  SARM1 targeting guide sequence portion
agguguacuggcggaagcgcgg

SEQ ID NO: 9445 - RNA, 22 nt, Artificial Sequence
  SARM1 targeting guide sequence portion
agguucuuuagggagcucacgg

SEQ ID NO: 9446 - RNA, 22 nt, Artificial Sequence
  SARM1 targeting guide sequence portion
agguugcugcggucgcacguag

SEQ ID NO: 9447 - RNA, 22 nt, Artificial Sequence
  SARM1 targeting guide sequence portion
aguacaccuacggccuggucag

SEQ ID NO: 9448 - RNA, 22 nt, Artificial Sequence
  SARM1 targeting guide sequence portion
aguccgccagguugcugcgguc

SEQ ID NO: 9449 - RNA, 22 nt, Artificial Sequence
  SARM1 targeting guide sequence portion
agucuuccagcagcugcugcuc

SEQ ID NO: 9450 - RNA, 22 nt, Artificial Sequence
  SARM1 targeting guide sequence portion
aguuggcgaaggucuugagcuc

SEQ ID NO: 9451 - RNA, 22 nt, Artificial Sequence
  SARM1 targeting guide sequence portion
auaguuggcgaaggucuugagc

SEQ ID NO: 9452 - RNA, 22 nt, Artificial Sequence
  SARM1 targeting guide sequence portion
auccaccugggcgugcaccgcg

SEQ ID NO: 9453 - RNA, 22 nt, Artificial Sequence
  SARM1 targeting guide sequence portion
augccgcagucuuccagcagcu

SEQ ID NO: 9454 - RNA, 22 nt, Artificial Sequence
  SARM1 targeting guide sequence portion
augcgggcgcggugcacgccca

SEQ ID NO: 9455 - RNA, 22 nt, Artificial Sequence
  SARM1 targeting guide sequence portion
auucuacgugcgaccgcagcaa

SEQ ID NO: 9456 - RNA, 22 nt, Artificial Sequence
  SARM1 targeting guide sequence portion
caaccuggcggacuggcugggc

SEQ ID NO: 9457 - RNA, 22 nt, Artificial Sequence
  SARM1 targeting guide sequence portion
caacuauucuacgugcgaccgc

SEQ ID NO: 9458 - RNA, 22 nt, Artificial Sequence
  SARM1 targeting guide sequence portion
caagaccuucgccaacuauucu

SEQ ID NO: 9459 - RNA, 22 nt, Artificial Sequence
  SARM1 targeting guide sequence portion
caccgcgcccgcauccucacgg

SEQ ID NO: 9460 - RNA, 22 nt, Artificial Sequence
  SARM1 targeting guide sequence portion
caccgcgugucugagcagcagc

SEQ ID NO: 9461 - RNA, 22 nt, Artificial Sequence
  SARM1 targeting guide sequence portion
caccuacggccuggucagcugc

SEQ ID NO: 9462 - RNA, 22 nt, Artificial Sequence
  SARM1 targeting guide sequence portion
caccugggcgugcaccgcgccc

SEQ ID NO: 9463 - RNA, 22 nt, Artificial Sequence
  SARM1 targeting guide sequence portion
cacgcccagguggaugccgcag

SEQ ID NO: 9464 - RNA, 22 nt, Artificial Sequence
  SARM1 targeting guide sequence portion
cacgcggugcagcagggagcgg

SEQ ID NO: 9465 - RNA, 22 nt, Artificial Sequence
  SARM1 targeting guide sequence portion
cacggagcucaagaccuucgcc

SEQ ID NO: 9466 - RNA, 22 nt, Artificial Sequence
  SARM1 targeting guide sequence portion
cacguagaauaguuggcgaagg

SEQ ID NO: 9467 - RNA, 22 nt, Artificial Sequence
  SARM1 targeting guide sequence portion
cagacacgcggugcagcaggga

SEQ ID NO: 9468 - RNA, 22 nt, Artificial Sequence
  SARM1 targeting guide sequence portion
cagcaaccuggcggacuggcug

SEQ ID NO: 9469 - RNA, 22 nt, Artificial Sequence
  SARM1 targeting guide sequence portion
cagcagcugcugcucagacacg

SEQ ID NO: 9470 - RNA, 22 nt, Artificial Sequence
  SARM1 targeting guide sequence portion
cagcagcugcuggaagacugcg

SEQ ID NO: 9471 - RNA, 22 nt, Artificial Sequence
  SARM1 targeting guide sequence portion
cagcagggagcgguccaggccg

SEQ ID NO: 9472 - RNA, 22 nt, Artificial Sequence
  SARM1 targeting guide sequence portion
cagccaguccgccagguugcug

SEQ ID NO: 9473 - RNA, 22 nt, Artificial Sequence
  SARM1 targeting guide sequence portion
cagccuggacccgcgcuuccgc

SEQ ID NO: 9474 - RNA, 22 nt, Artificial Sequence
  SARM1 targeting guide sequence portion
cagcugaccaggccguaggugu

SEQ ID NO: 9475 - RNA, 22 nt, Artificial Sequence
  SARM1 targeting guide sequence portion
cagcugcggccuggaccgcucc

SEQ ID NO: 9476 - RNA, 22 nt, Artificial Sequence
  SARM1 targeting guide sequence portion
cagcugcugcucagacacgcgg

SEQ ID NO: 9477 - RNA, 22 nt, Artificial Sequence
  SARM1 targeting guide sequence portion
cagcugcuggaagacugcggca

SEQ ID NO: 9478 - RNA, 22 nt, Artificial Sequence
  SARM1 targeting guide sequence portion
caggccgcagcugaccaggccg

SEQ ID NO: 9479 - RNA, 22 nt, Artificial Sequence
  SARM1 targeting guide sequence portion
caggccguagguguacuggcgg

SEQ ID NO: 9480 - RNA, 22 nt, Artificial Sequence
  SARM1 targeting guide sequence portion
caggcugcccagccaguccgcc

SEQ ID NO: 9481 - RNA, 22 nt, Artificial Sequence
  SARM1 targeting guide sequence portion
cagggagcgguccaggccgcag

SEQ ID NO: 9482 - RNA, 22 nt, Artificial Sequence
  SARM1 targeting guide sequence portion
cagguggaugccgcagucuucc

SEQ ID NO: 9483 - RNA, 22 nt, Artificial Sequence
  SARM1 targeting guide sequence portion
cagguucuuuagggagcucacg

SEQ ID NO: 9484 - RNA, 22 nt, Artificial Sequence
  SARM1 targeting guide sequence portion
cagguugcugcggucgcacgua

SEQ ID NO: 9485 - RNA, 22 nt, Artificial Sequence
  SARM1 targeting guide sequence portion
caguacaccuacggccugguca

SEQ ID NO: 9486 - RNA, 22 nt, Artificial Sequence
  SARM1 targeting guide sequence portion
caguccgccagguugcugcggu

SEQ ID NO: 9487 - RNA, 22 nt, Artificial Sequence
  SARM1 targeting guide sequence portion
cagucuuccagcagcugcugcu

SEQ ID NO: 9488 - RNA, 22 nt, Artificial Sequence
  SARM1 targeting guide sequence portion
cauccaccugggcgugcaccgc

SEQ ID NO: 9489 - RNA, 22 nt, Artificial Sequence
  SARM1 targeting guide sequence portion
ccaacuauucuacgugcgaccg

SEQ ID NO: 9490 - RNA, 22 nt, Artificial Sequence
  SARM1 targeting guide sequence portion
ccaccugggcgugcaccgcgcc

SEQ ID NO: 9491 - RNA, 22 nt, Artificial Sequence
  SARM1 targeting guide sequence portion
ccagcagcugcugcucagacac

SEQ ID NO: 9492 - RNA, 22 nt, Artificial Sequence
  SARM1 targeting guide sequence portion
ccagccaguccgccagguugcu

SEQ ID NO: 9493 - RNA, 22 nt, Artificial Sequence
  SARM1 targeting guide sequence portion
ccaggccgcagcugaccaggcc

SEQ ID NO: 9494 - RNA, 22 nt, Artificial Sequence
  SARM1 targeting guide sequence portion
ccaggccguagguguacuggcg

SEQ ID NO: 9495 - RNA, 22 nt, Artificial Sequence
  SARM1 targeting guide sequence portion
ccaggcugcccagccaguccgc

SEQ ID NO: 9496 - RNA, 22 nt, Artificial Sequence
  SARM1 targeting guide sequence portion
ccagguggaugccgcagucuuc

SEQ ID NO: 9497 - RNA, 22 nt, Artificial Sequence
  SARM1 targeting guide sequence portion
ccagguugcugcggucgcacgu

SEQ ID NO: 9498 - RNA, 22 nt, Artificial Sequence
  SARM1 targeting guide sequence portion
ccaguacaccuacggccugguc

SEQ ID NO: 9499 - RNA, 22 nt, Artificial Sequence
  SARM1 targeting guide sequence portion
ccaguccgccagguugcugcgg

SEQ ID NO: 9500 - RNA, 22 nt, Artificial Sequence
  SARM1 targeting guide sequence portion
cccagccaguccgccagguugc

SEQ ID NO: 9501 - RNA, 22 nt, Artificial Sequence
  SARM1 targeting guide sequence portion
cccagguggaugccgcagucuu

SEQ ID NO: 9502 - RNA, 22 nt, Artificial Sequence
  SARM1 targeting guide sequence portion
cccgcauccucacggcggccag

SEQ ID NO: 9503 - RNA, 22 nt, Artificial Sequence
  SARM1 targeting guide sequence portion
cccgcgcuuccgccaguacacc

SEQ ID NO: 9504 - RNA, 22 nt, Artificial Sequence
  SARM1 targeting guide sequence portion
cccugcugcaccgcgugucuga

SEQ ID NO: 9505 - RNA, 22 nt, Artificial Sequence
  SARM1 targeting guide sequence portion
ccgcagcaaccuggcggacugg

SEQ ID NO: 9506 - RNA, 22 nt, Artificial Sequence
  SARM1 targeting guide sequence portion
ccgcagcugaccaggccguagg

SEQ ID NO: 9507 - RNA, 22 nt, Artificial Sequence
  SARM1 targeting guide sequence portion
ccgcagucuuccagcagcugcu

SEQ ID NO: 9508 - RNA, 22 nt, Artificial Sequence
  SARM1 targeting guide sequence portion
ccgcauccucacggcggccaga

SEQ ID NO: 9509 - RNA, 22 nt, Artificial Sequence
  SARM1 targeting guide sequence portion
ccgccagguugcugcggucgca

SEQ ID NO: 9510 - RNA, 22 nt, Artificial Sequence
  SARM1 targeting guide sequence portion
ccgccaguacaccuacggccug

SEQ ID NO: 9511 - RNA, 22 nt, Artificial Sequence
  SARM1 targeting guide sequence portion
ccgccgugaggaugcgggcgcg

SEQ ID NO: 9512 - RNA, 22 nt, Artificial Sequence
  SARM1 targeting guide sequence portion
ccgcgcccgcauccucacggcg

SEQ ID NO: 9513 - RNA, 22 nt, Artificial Sequence
  SARM1 targeting guide sequence portion
ccgcgcuuccgccaguacaccu

SEQ ID NO: 9514 - RNA, 22 nt, Artificial Sequence
  SARM1 targeting guide sequence portion
ccgcgugucugagcagcagcug

SEQ ID NO: 9515 - RNA, 22 nt, Artificial Sequence
  SARM1 targeting guide sequence portion
ccgcucccugcugcaccgcgug

SEQ ID NO: 9516 - RNA, 22 nt, Artificial Sequence
  SARM1 targeting guide sequence portion
ccguagguguacuggcggaagc

SEQ ID NO: 9517 - RNA, 22 nt, Artificial Sequence
  SARM1 targeting guide sequence portion
ccgugaggaugcgggcgcggug

SEQ ID NO: 9518 - RNA, 22 nt, Artificial Sequence
  SARM1 targeting guide sequence portion
ccuacggccuggucagcugcgg

SEQ ID NO: 9519 - RNA, 22 nt, Artificial Sequence
  SARM1 targeting guide sequence portion
ccucuggccgccgugaggaugc

SEQ ID NO: 9520 - RNA, 22 nt, Artificial Sequence
  SARM1 targeting guide sequence portion
ccugcugcaccgcgugucugag

SEQ ID NO: 9521 - RNA, 22 nt, Artificial Sequence
  SARM1 targeting guide sequence portion
ccuggacccgcgcuuccgccag

SEQ ID NO: 9522 - RNA, 22 nt, Artificial Sequence
  SARM1 targeting guide sequence portion
ccuggaccgcucccugcugcac

SEQ ID NO: 9523 - RNA, 22 nt, Artificial Sequence
  SARM1 targeting guide sequence portion
ccuggcggacuggcugggcagc

SEQ ID NO: 9524 - RNA, 22 nt, Artificial Sequence
  SARM1 targeting guide sequence portion
ccugggcgugcaccgcgcccgc

SEQ ID NO: 9525 - RNA, 22 nt, Artificial Sequence
  SARM1 targeting guide sequence portion
ccuggucagcugcggccuggac

SEQ ID NO: 9526 - RNA, 22 nt, Artificial Sequence
  SARM1 targeting guide sequence portion
ccuucgccaacuauucuacgug

SEQ ID NO: 9527 - RNA, 22 nt, Artificial Sequence
  SARM1 targeting guide sequence portion
cgaaggucuugagcuccgugag

SEQ ID NO: 9528 - RNA, 22 nt, Artificial Sequence
  SARM1 targeting guide sequence portion
cgaccgcagcaaccuggcggac

SEQ ID NO: 9529 - RNA, 22 nt, Artificial Sequence
  SARM1 targeting guide sequence portion
cgcacguagaauaguuggcgaa

SEQ ID NO: 9530 - RNA, 22 nt, Artificial Sequence
  SARM1 targeting guide sequence portion
cgcagcaaccuggcggacuggc

SEQ ID NO: 9531 - RNA, 22 nt, Artificial Sequence
  SARM1 targeting guide sequence portion
cgcagcugaccaggccguaggu

SEQ ID NO: 9532 - RNA, 22 nt, Artificial Sequence
  SARM1 targeting guide sequence portion
cgcagucuuccagcagcugcug

SEQ ID NO: 9533 - RNA, 22 nt, Artificial Sequence
  SARM1 targeting guide sequence portion
cgcauccucacggcggccagag

SEQ ID NO: 9534 - RNA, 22 nt, Artificial Sequence
  SARM1 targeting guide sequence portion
cgccaacuauucuacgugcgac

SEQ ID NO: 9535 - RNA, 22 nt, Artificial Sequence
  SARM1 targeting guide sequence portion
cgccagguugcugcggucgcac

SEQ ID NO: 9536 - RNA, 22 nt, Artificial Sequence
  SARM1 targeting guide sequence portion
cgccaguacaccuacggccugg

SEQ ID NO: 9537 - RNA, 22 nt, Artificial Sequence
  SARM1 targeting guide sequence portion
cgcccagguggaugccgcaguc

SEQ ID NO: 9538 - RNA, 22 nt, Artificial Sequence
  SARM1 targeting guide sequence portion
cgcccgcauccucacggcggcc

SEQ ID NO: 9539 - RNA, 22 nt, Artificial Sequence
  SARM1 targeting guide sequence portion
cgccgugaggaugcgggcgcgg

SEQ ID NO: 9540 - RNA, 22 nt, Artificial Sequence
  SARM1 targeting guide sequence portion
cgcgcccgcauccucacggcgg

SEQ ID NO: 9541 - RNA, 22 nt, Artificial Sequence
  SARM1 targeting guide sequence portion
cgcgcuuccgccaguacaccua

SEQ ID NO: 9542 - RNA, 22 nt, Artificial Sequence
  SARM1 targeting guide sequence portion
cgcggguccaggcugcccagcc

SEQ ID NO: 9543 - RNA, 22 nt, Artificial Sequence
  SARM1 targeting guide sequence portion
cgcggugcacgcccagguggau

SEQ ID NO: 9544 - RNA, 22 nt, Artificial Sequence
  SARM1 targeting guide sequence portion
cgcggugcagcagggagcgguc

SEQ ID NO: 9545 - RNA, 22 nt, Artificial Sequence
  SARM1 targeting guide sequence portion
cgcgugucugagcagcagcugc

SEQ ID NO: 9546 - RNA, 22 nt, Artificial Sequence
  SARM1 targeting guide sequence portion
cgcucccugcugcaccgcgugu

SEQ ID NO: 9547 - RNA, 22 nt, Artificial Sequence
  SARM1 targeting guide sequence portion
cgcuuccgccaguacaccuacg

SEQ ID NO: 9548 - RNA, 22 nt, Artificial Sequence
  SARM1 targeting guide sequence portion
cggaagcgcggguccaggcugc

SEQ ID NO: 9549 - RNA, 22 nt, Artificial Sequence
  SARM1 targeting guide sequence portion
cggacuggcugggcagccugga

SEQ ID NO: 9550 - RNA, 22 nt, Artificial Sequence
  SARM1 targeting guide sequence portion
cggagcucaagaccuucgccaa

SEQ ID NO: 9551 - RNA, 22 nt, Artificial Sequence
  SARM1 targeting guide sequence portion
cggcauccaccugggcgugcac

SEQ ID NO: 9552 - RNA, 22 nt, Artificial Sequence
  SARM1 targeting guide sequence portion
cggccuggaccgcucccugcug

SEQ ID NO: 9553 - RNA, 22 nt, Artificial Sequence
  SARM1 targeting guide sequence portion
cggccuggucagcugcggccug

SEQ ID NO: 9554 - RNA, 22 nt, Artificial Sequence
  SARM1 targeting guide sequence portion
cgggcgcggugcacgcccaggu

SEQ ID NO: 9555 - RNA, 22 nt, Artificial Sequence
  SARM1 targeting guide sequence portion
cggguccaggcugcccagccag

SEQ ID NO: 9556 - RNA, 22 nt, Artificial Sequence
  SARM1 targeting guide sequence portion
cgguccaggccgcagcugacca

SEQ ID NO: 9557 - RNA, 22 nt, Artificial Sequence
  SARM1 targeting guide sequence portion
cggucgcacguagaauaguugg

SEQ ID NO: 9558 - RNA, 22 nt, Artificial Sequence
  SARM1 targeting guide sequence portion
cggugcacgcccagguggaugc

SEQ ID NO: 9559 - RNA, 22 nt, Artificial Sequence
  SARM1 targeting guide sequence portion
cggugcagcagggagcggucca

SEQ ID NO: 9560 - RNA, 22 nt, Artificial Sequence
  SARM1 targeting guide sequence portion
cguagaauaguuggcgaagguc

SEQ ID NO: 9561 - RNA, 22 nt, Artificial Sequence
  SARM1 targeting guide sequence portion
cguagguguacuggcggaagcg

SEQ ID NO: 9562 - RNA, 22 nt, Artificial Sequence
  SARM1 targeting guide sequence portion
cgugaggaugcgggcgcggugc

SEQ ID NO: 9563 - RNA, 22 nt, Artificial Sequence
  SARM1 targeting guide sequence portion
cgugcaccgcgcccgcauccuc

SEQ ID NO: 9564 - RNA, 22 nt, Artificial Sequence
  SARM1 targeting guide sequence portion
cgugcgaccgcagcaaccuggc

SEQ ID NO: 9565 - RNA, 22 nt, Artificial Sequence
  SARM1 targeting guide sequence portion
cgugucugagcagcagcugcug

SEQ ID NO: 9566 - RNA, 22 nt, Artificial Sequence
  SARM1 targeting guide sequence portion
cuacggccuggucagcugcggc

SEQ ID NO: 9567 - RNA, 22 nt, Artificial Sequence
  SARM1 targeting guide sequence portion
cuacgugcgaccgcagcaaccu

SEQ ID NO: 9568 - RNA, 22 nt, Artificial Sequence
  SARM1 targeting guide sequence portion
cuauucuacgugcgaccgcagc

SEQ ID NO: 9569 - RNA, 22 nt, Artificial Sequence
  SARM1 targeting guide sequence portion
cucaagaccuucgccaacuauu

SEQ ID NO: 9570 - RNA, 22 nt, Artificial Sequence
  SARM1 targeting guide sequence portion
cucacggagcucaagaccuucg

SEQ ID NO: 9571 - RNA, 22 nt, Artificial Sequence
  SARM1 targeting guide sequence portion
cucagacacgcggugcagcagg

SEQ ID NO: 9572 - RNA, 22 nt, Artificial Sequence
  SARM1 targeting guide sequence portion
cucccugcugcaccgcgugucu

SEQ ID NO: 9573 - RNA, 22 nt, Artificial Sequence
  SARM1 targeting guide sequence portion
cuccgugagcucccuaaagaac

SEQ ID NO: 9574 - RNA, 22 nt, Artificial Sequence
  SARM1 targeting guide sequence portion
cucuggccgccgugaggaugcg

SEQ ID NO: 9575 - RNA, 22 nt, Artificial Sequence
  SARM1 targeting guide sequence portion
cugaccaggccguagguguacu

SEQ ID NO: 9576 - RNA, 22 nt, Artificial Sequence
  SARM1 targeting guide sequence portion
cugaccucuggccgccgugagg

SEQ ID NO: 9577 - RNA, 22 nt, Artificial Sequence
  SARM1 targeting guide sequence portion
cugagcagcagcugcuggaaga

SEQ ID NO: 9578 - RNA, 22 nt, Artificial Sequence
  SARM1 targeting guide sequence portion
cugcaccgcgugucugagcagc

SEQ ID NO: 9579 - RNA, 22 nt, Artificial Sequence
  SARM1 targeting guide sequence portion
cugcccagccaguccgccaggu

SEQ ID NO: 9580 - RNA, 22 nt, Artificial Sequence
  SARM1 targeting guide sequence portion
cugcggcauccaccugggcgug

SEQ ID NO: 9581 - RNA, 22 nt, Artificial Sequence
  SARM1 targeting guide sequence portion
cugcggccuggaccgcucccug

SEQ ID NO: 9582 - RNA, 22 nt, Artificial Sequence
  SARM1 targeting guide sequence portion
cugcggucgcacguagaauagu

SEQ ID NO: 9583 - RNA, 22 nt, Artificial Sequence
  SARM1 targeting guide sequence portion
cugcucagacacgcggugcagc

SEQ ID NO: 9584 - RNA, 22 nt, Artificial Sequence
  SARM1 targeting guide sequence portion
cugcugcaccgcgugucugagc

SEQ ID NO: 9585 - RNA, 22 nt, Artificial Sequence
  SARM1 targeting guide sequence portion
cugcugcucagacacgcggugc

SEQ ID NO: 9586 - RNA, 22 nt, Artificial Sequence
  SARM1 targeting guide sequence portion
cugcuggaagacugcggcaucc

SEQ ID NO: 9587 - RNA, 22 nt, Artificial Sequence
  SARM1 targeting guide sequence portion
cuggaagacugcggcauccacc

SEQ ID NO: 9588 - RNA, 22 nt, Artificial Sequence
  SARM1 targeting guide sequence portion
cuggacccgcgcuuccgccagu

SEQ ID NO: 9589 - RNA, 22 nt, Artificial Sequence
  SARM1 targeting guide sequence portion
cuggaccgcucccugcugcacc

SEQ ID NO: 9590 - RNA, 22 nt, Artificial Sequence
  SARM1 targeting guide sequence portion
cuggccgccgugaggaugcggg

SEQ ID NO: 9591 - RNA, 22 nt, Artificial Sequence
  SARM1 targeting guide sequence portion
cuggcggaagcgcggguccagg

SEQ ID NO: 9592 - RNA, 22 nt, Artificial Sequence
  SARM1 targeting guide sequence portion
cuggcggacuggcugggcagcc

SEQ ID NO: 9593 - RNA, 22 nt, Artificial Sequence
  SARM1 targeting guide sequence portion
cuggcugggcagccuggacccg

SEQ ID NO: 9594 - RNA, 22 nt, Artificial Sequence
  SARM1 targeting guide sequence portion
cugggcagccuggacccgcgcu

SEQ ID NO: 9595 - RNA, 22 nt, Artificial Sequence
  SARM1 targeting guide sequence portion
cugggcgugcaccgcgcccgca

SEQ ID NO: 9596 - RNA, 22 nt, Artificial Sequence
  SARM1 targeting guide sequence portion
cuggucagcugcggccuggacc

SEQ ID NO: 9597 - RNA, 22 nt, Artificial Sequence
  SARM1 targeting guide sequence portion
cuuccagcagcugcugcucaga

SEQ ID NO: 9598 - RNA, 22 nt, Artificial Sequence
  SARM1 targeting guide sequence portion
cuuccgccaguacaccuacggc

SEQ ID NO: 9599 - RNA, 22 nt, Artificial Sequence
  SARM1 targeting guide sequence portion
cuucgccaacuauucuacgugc

SEQ ID NO: 9600 - RNA, 22 nt, Artificial Sequence
  SARM1 targeting guide sequence portion
cuugagcuccgugagcucccua

SEQ ID NO: 9601 - RNA, 22 nt, Artificial Sequence
  SARM1 targeting guide sequence portion
cuuuagggagcucacggagcuc

SEQ ID NO: 9602 - RNA, 22 nt, Artificial Sequence
  SARM1 targeting guide sequence portion
gaagacugcggcauccaccugg

SEQ ID NO: 9603 - RNA, 22 nt, Artificial Sequence
  SARM1 targeting guide sequence portion
gaagcgcggguccaggcugccc

SEQ ID NO: 9604 - RNA, 22 nt, Artificial Sequence
  SARM1 targeting guide sequence portion
gaaggucuugagcuccgugagc

SEQ ID NO: 9605 - RNA, 22 nt, Artificial Sequence
  SARM1 targeting guide sequence portion
gaauaguuggcgaaggucuuga

SEQ ID NO: 9606 - RNA, 22 nt, Artificial Sequence
  SARM1 targeting guide sequence portion
gacacgcggugcagcagggagc

SEQ ID NO: 9607 - RNA, 22 nt, Artificial Sequence
  SARM1 targeting guide sequence portion
gaccaggccguagguguacugg

SEQ ID NO: 9608 - RNA, 22 nt, Artificial Sequence
  SARM1 targeting guide sequence portion
gacccgcgcuuccgccaguaca

SEQ ID NO: 9609 - RNA, 22 nt, Artificial Sequence
  SARM1 targeting guide sequence portion
gaccgcagcaaccuggcggacu

SEQ ID NO: 9610 - RNA, 22 nt, Artificial Sequence
  SARM1 targeting guide sequence portion
gaccgcucccugcugcaccgcg

SEQ ID NO: 9611 - RNA, 22 nt, Artificial Sequence
  SARM1 targeting guide sequence portion
gaccucuggccgccgugaggau

SEQ ID NO: 9612 - RNA, 22 nt, Artificial Sequence
  SARM1 targeting guide sequence portion
gaccuucgccaacuauucuacg

SEQ ID NO: 9613 - RNA, 22 nt, Artificial Sequence
  SARM1 targeting guide sequence portion
gacugcggcauccaccugggcg

SEQ ID NO: 9614 - RNA, 22 nt, Artificial Sequence
  SARM1 targeting guide sequence portion
gacuggcugggcagccuggacc

SEQ ID NO: 9615 - RNA, 22 nt, Artificial Sequence
  SARM1 targeting guide sequence portion
gagcagcagcugcuggaagacu

SEQ ID NO: 9616 - RNA, 22 nt, Artificial Sequence
  SARM1 targeting guide sequence portion
gagcgguccaggccgcagcuga

SEQ ID NO: 9617 - RNA, 22 nt, Artificial Sequence
  SARM1 targeting guide sequence portion
gagcucaagaccuucgccaacu

SEQ ID NO: 9618 - RNA, 22 nt, Artificial Sequence
  SARM1 targeting guide sequence portion
gagcucacggagcucaagaccu

SEQ ID NO: 9619 - RNA, 22 nt, Artificial Sequence
  SARM1 targeting guide sequence portion
gagcuccgugagcucccuaaag

SEQ ID NO: 9620 - RNA, 22 nt, Artificial Sequence
  SARM1 targeting guide sequence portion
gaggaugcgggcgcggugcacg

SEQ ID NO: 9621 - RNA, 22 nt, Artificial Sequence
  SARM1 targeting guide sequence portion
gaugccgcagucuuccagcagc

SEQ ID NO: 9622 - RNA, 22 nt, Artificial Sequence
  SARM1 targeting guide sequence portion
gaugcgggcgcggugcacgccc

SEQ ID NO: 9623 - RNA, 22 nt, Artificial Sequence
  SARM1 targeting guide sequence portion
gcaaccuggcggacuggcuggg

SEQ ID NO: 9624 - RNA, 22 nt, Artificial Sequence
  SARM1 targeting guide sequence portion
gcaccgcgcccgcauccucacg

SEQ ID NO: 9625 - RNA, 22 nt, Artificial Sequence
  SARM1 targeting guide sequence portion
gcaccgcgugucugagcagcag

SEQ ID NO: 9626 - RNA, 22 nt, Artificial Sequence
  SARM1 targeting guide sequence portion
gcacgcccagguggaugccgca

SEQ ID NO: 9627 - RNA, 22 nt, Artificial Sequence
  SARM1 targeting guide sequence portion
gcacguagaauaguuggcgaag

SEQ ID NO: 9628 - RNA, 22 nt, Artificial Sequence
  SARM1 targeting guide sequence portion
gcagcaaccuggcggacuggcu

SEQ ID NO: 9629 - RNA, 22 nt, Artificial Sequence
  SARM1 targeting guide sequence portion
gcagcagcugcuggaagacugc

SEQ ID NO: 9630 - RNA, 22 nt, Artificial Sequence
  SARM1 targeting guide sequence portion
gcagcagggagcgguccaggcc

SEQ ID NO: 9631 - RNA, 22 nt, Artificial Sequence
  SARM1 targeting guide sequence portion
gcagccuggacccgcgcuuccg

SEQ ID NO: 9632 - RNA, 22 nt, Artificial Sequence
  SARM1 targeting guide sequence portion
gcagcugaccaggccguaggug

SEQ ID NO: 9633 - RNA, 22 nt, Artificial Sequence
  SARM1 targeting guide sequence portion
gcagcugcugcucagacacgcg

SEQ ID NO: 9634 - RNA, 22 nt, Artificial Sequence
  SARM1 targeting guide sequence portion
gcagcugcuggaagacugcggc

SEQ ID NO: 9635 - RNA, 22 nt, Artificial Sequence
  SARM1 targeting guide sequence portion
gcagggagcgguccaggccgca

SEQ ID NO: 9636 - RNA, 22 nt, Artificial Sequence
  SARM1 targeting guide sequence portion
gcagguucuuuagggagcucac

SEQ ID NO: 9637 - RNA, 22 nt, Artificial Sequence
  SARM1 targeting guide sequence portion
gcagucuuccagcagcugcugc

SEQ ID NO: 9638 - RNA, 22 nt, Artificial Sequence
  SARM1 targeting guide sequence portion
gcauccaccugggcgugcaccg

SEQ ID NO: 9639 - RNA, 22 nt, Artificial Sequence
  SARM1 targeting guide sequence portion
gcauccucacggcggccagagg

SEQ ID NO: 9640 - RNA, 22 nt, Artificial Sequence
  SARM1 targeting guide sequence portion
gccaacuauucuacgugcgacc

SEQ ID NO: 9641 - RNA, 22 nt, Artificial Sequence
  SARM1 targeting guide sequence portion
gccagguugcugcggucgcacg

SEQ ID NO: 9642 - RNA, 22 nt, Artificial Sequence
  SARM1 targeting guide sequence portion
gccaguacaccuacggccuggu

SEQ ID NO: 9643 - RNA, 22 nt, Artificial Sequence
  SARM1 targeting guide sequence portion
gccaguccgccagguugcugcg

SEQ ID NO: 9644 - RNA, 22 nt, Artificial Sequence
  SARM1 targeting guide sequence portion
gcccagccaguccgccagguug

SEQ ID NO: 9645 - RNA, 22 nt, Artificial Sequence
  SARM1 targeting guide sequence portion
gcccagguggaugccgcagucu

SEQ ID NO: 9646 - RNA, 22 nt, Artificial Sequence
  SARM1 targeting guide sequence portion
gcccgcauccucacggcggcca

SEQ ID NO: 9647 - RNA, 22 nt, Artificial Sequence
  SARM1 targeting guide sequence portion
gccgcagcugaccaggccguag

SEQ ID NO: 9648 - RNA, 22 nt, Artificial Sequence
  SARM1 targeting guide sequence portion
gccgcagucuuccagcagcugc

SEQ ID NO: 9649 - RNA, 22 nt, Artificial Sequence
  SARM1 targeting guide sequence portion
gccgccgugaggaugcgggcgc

SEQ ID NO: 9650 - RNA, 22 nt, Artificial Sequence
  SARM1 targeting guide sequence portion
gccguagguguacuggcggaag

SEQ ID NO: 9651 - RNA, 22 nt, Artificial Sequence
  SARM1 targeting guide sequence portion
gccgugaggaugcgggcgcggu

SEQ ID NO: 9652 - RNA, 22 nt, Artificial Sequence
  SARM1 targeting guide sequence portion
gccuggacccgcgcuuccgcca

SEQ ID NO: 9653 - RNA, 22 nt, Artificial Sequence
  SARM1 targeting guide sequence portion
gccuggaccgcucccugcugca

SEQ ID NO: 9654 - RNA, 22 nt, Artificial Sequence
  SARM1 targeting guide sequence portion
gccuggucagcugcggccugga

SEQ ID NO: 9655 - RNA, 22 nt, Artificial Sequence
  SARM1 targeting guide sequence portion
gcgaaggucuugagcuccguga

SEQ ID NO: 9656 - RNA, 22 nt, Artificial Sequence
  SARM1 targeting guide sequence portion
gcgaccgcagcaaccuggcgga

SEQ ID NO: 9657 - RNA, 22 nt, Artificial Sequence
  SARM1 targeting guide sequence portion
gcgcccgcauccucacggcggc

SEQ ID NO: 9658 - RNA, 22 nt, Artificial Sequence
  SARM1 targeting guide sequence portion
gcgcggguccaggcugcccagc

SEQ ID NO: 9659 - RNA, 22 nt, Artificial Sequence
  SARM1 targeting guide sequence portion
gcgcggugcacgcccaggugga

SEQ ID NO: 9660 - RNA, 22 nt, Artificial Sequence
  SARM1 targeting guide sequence portion
gcgcuuccgccaguacaccuac

SEQ ID NO: 9661 - RNA, 22 nt, Artificial Sequence
  SARM1 targeting guide sequence portion
gcggaagcgcggguccaggcug

SEQ ID NO: 9662 - RNA, 22 nt, Artificial Sequence
  SARM1 targeting guide sequence portion
gcggacuggcugggcagccugg

SEQ ID NO: 9663 - RNA, 22 nt, Artificial Sequence
  SARM1 targeting guide sequence portion
gcggcauccaccugggcgugca

SEQ ID NO: 9664 - RNA, 22 nt, Artificial Sequence
  SARM1 targeting guide sequence portion
gcggccuggaccgcucccugcu

SEQ ID NO: 9665 - RNA, 22 nt, Artificial Sequence
  SARM1 targeting guide sequence portion
gcgggcgcggugcacgcccagg

SEQ ID NO: 9666 - RNA, 22 nt, Artificial Sequence
  SARM1 targeting guide sequence portion
gcggguccaggcugcccagcca

SEQ ID NO: 9667 - RNA, 22 nt, Artificial Sequence
  SARM1 targeting guide sequence portion
gcgguccaggccgcagcugacc

SEQ ID NO: 9668 - RNA, 22 nt, Artificial Sequence
  SARM1 targeting guide sequence portion
gcggucgcacguagaauaguug

SEQ ID NO: 9669 - RNA, 22 nt, Artificial Sequence
  SARM1 targeting guide sequence portion
gcggugcacgcccagguggaug

SEQ ID NO: 9670 - RNA, 22 nt, Artificial Sequence
  SARM1 targeting guide sequence portion
gcggugcagcagggagcggucc

SEQ ID NO: 9671 - RNA, 22 nt, Artificial Sequence
  SARM1 targeting guide sequence portion
gcgugcaccgcgcccgcauccu

SEQ ID NO: 9672 - RNA, 22 nt, Artificial Sequence
  SARM1 targeting guide sequence portion
gcgugucugagcagcagcugcu

SEQ ID NO: 9673 - RNA, 22 nt, Artificial Sequence
  SARM1 targeting guide sequence portion
gcucaagaccuucgccaacuau

SEQ ID NO: 9674 - RNA, 22 nt, Artificial Sequence
  SARM1 targeting guide sequence portion
gcucacggagcucaagaccuuc

SEQ ID NO: 9675 - RNA, 22 nt, Artificial Sequence
  SARM1 targeting guide sequence portion
gcucagacacgcggugcagcag

SEQ ID NO: 9676 - RNA, 22 nt, Artificial Sequence
  SARM1 targeting guide sequence portion
gcucccugcugcaccgcguguc

SEQ ID NO: 9677 - RNA, 22 nt, Artificial Sequence
  SARM1 targeting guide sequence portion
gcuccgugagcucccuaaagaa

SEQ ID NO: 9678 - RNA, 22 nt, Artificial Sequence
  SARM1 targeting guide sequence portion
gcugaccaggccguagguguac

SEQ ID NO: 9679 - RNA, 22 nt, Artificial Sequence
  SARM1 targeting guide sequence portion
gcugaccucuggccgccgugag

SEQ ID NO: 9680 - RNA, 22 nt, Artificial Sequence
  SARM1 targeting guide sequence portion
gcugcaccgcgugucugagcag

SEQ ID NO: 9681 - RNA, 22 nt, Artificial Sequence
  SARM1 targeting guide sequence portion
gcugcccagccaguccgccagg

SEQ ID NO: 9682 - RNA, 22 nt, Artificial Sequence
  SARM1 targeting guide sequence portion
gcugcggccuggaccgcucccu

SEQ ID NO: 9683 - RNA, 22 nt, Artificial Sequence
  SARM1 targeting guide sequence portion
gcugcggucgcacguagaauag

SEQ ID NO: 9684 - RNA, 22 nt, Artificial Sequence
  SARM1 targeting guide sequence portion
gcugcucagacacgcggugcag

SEQ ID NO: 9685 - RNA, 22 nt, Artificial Sequence
  SARM1 targeting guide sequence portion
gcugcugcucagacacgcggug

SEQ ID NO: 9686 - RNA, 22 nt, Artificial Sequence
  SARM1 targeting guide sequence portion
gcugcuggaagacugcggcauc

SEQ ID NO: 9687 - RNA, 22 nt, Artificial Sequence
  SARM1 targeting guide sequence portion
gcuggaagacugcggcauccac

SEQ ID NO: 9688 - RNA, 22 nt, Artificial Sequence
  SARM1 targeting guide sequence portion
gcugggcagccuggacccgcgc

SEQ ID NO: 9689 - RNA, 22 nt, Artificial Sequence
  SARM1 targeting guide sequence portion
gcuuccgccaguacaccuacgg

SEQ ID NO: 9690 - RNA, 22 nt, Artificial Sequence
  SARM1 targeting guide sequence portion
ggaagacugcggcauccaccug

SEQ ID NO: 9691 - RNA, 22 nt, Artificial Sequence
  SARM1 targeting guide sequence portion
ggaagcgcggguccaggcugcc

SEQ ID NO: 9692 - RNA, 22 nt, Artificial Sequence
  SARM1 targeting guide sequence portion
ggacccgcgcuuccgccaguac

SEQ ID NO: 9693 - RNA, 22 nt, Artificial Sequence
  SARM1 targeting guide sequence portion
ggaccgcucccugcugcaccgc

SEQ ID NO: 9694 - RNA, 22 nt, Artificial Sequence
  SARM1 targeting guide sequence portion
ggacuggcugggcagccuggac

SEQ ID NO: 9695 - RNA, 22 nt, Artificial Sequence
  SARM1 targeting guide sequence portion
ggagcgguccaggccgcagcug

SEQ ID NO: 9696 - RNA, 22 nt, Artificial Sequence
  SARM1 targeting guide sequence portion
ggagcucaagaccuucgccaac

SEQ ID NO: 9697 - RNA, 22 nt, Artificial Sequence
  SARM1 targeting guide sequence portion
ggagcucacggagcucaagacc

SEQ ID NO: 9698 - RNA, 22 nt, Artificial Sequence
  SARM1 targeting guide sequence portion
ggaugccgcagucuuccagcag

SEQ ID NO: 9699 - RNA, 22 nt, Artificial Sequence
  SARM1 targeting guide sequence portion
ggaugcgggcgcggugcacgcc

SEQ ID NO: 9700 - RNA, 22 nt, Artificial Sequence
  SARM1 targeting guide sequence portion
ggcagccuggacccgcgcuucc

SEQ ID NO: 9701 - RNA, 22 nt, Artificial Sequence
  SARM1 targeting guide sequence portion
ggcauccaccugggcgugcacc

SEQ ID NO: 9702 - RNA, 22 nt, Artificial Sequence
  SARM1 targeting guide sequence portion
ggccgcagcugaccaggccgua

SEQ ID NO: 9703 - RNA, 22 nt, Artificial Sequence
  SARM1 targeting guide sequence portion
ggccgccgugaggaugcgggcg

SEQ ID NO: 9704 - RNA, 22 nt, Artificial Sequence
  SARM1 targeting guide sequence portion
ggccguagguguacuggcggaa

SEQ ID NO: 9705 - RNA, 22 nt, Artificial Sequence
  SARM1 targeting guide sequence portion
ggccuggaccgcucccugcugc

SEQ ID NO: 9706 - RNA, 22 nt, Artificial Sequence
  SARM1 targeting guide sequence portion
ggccuggucagcugcggccugg

SEQ ID NO: 9707 - RNA, 22 nt, Artificial Sequence
  SARM1 targeting guide sequence portion
ggcgaaggucuugagcuccgug

SEQ ID NO: 9708 - RNA, 22 nt, Artificial Sequence
  SARM1 targeting guide sequence portion
ggcgcggugcacgcccaggugg

SEQ ID NO: 9709 - RNA, 22 nt, Artificial Sequence
  SARM1 targeting guide sequence portion
ggcggaagcgcggguccaggcu

SEQ ID NO: 9710 - RNA, 22 nt, Artificial Sequence
  SARM1 targeting guide sequence portion
ggcggacuggcugggcagccug

SEQ ID NO: 9711 - RNA, 22 nt, Artificial Sequence
  SARM1 targeting guide sequence portion
ggcgugcaccgcgcccgcaucc

SEQ ID NO: 9712 - RNA, 22 nt, Artificial Sequence
  SARM1 targeting guide sequence portion
ggcugaccucuggccgccguga

SEQ ID NO: 9713 - RNA, 22 nt, Artificial Sequence
  SARM1 targeting guide sequence portion
ggcugcccagccaguccgccag

SEQ ID NO: 9714 - RNA, 22 nt, Artificial Sequence
  SARM1 targeting guide sequence portion
ggcugggcagccuggacccgcg

SEQ ID NO: 9715 - RNA, 22 nt, Artificial Sequence
  SARM1 targeting guide sequence portion
gggagcgguccaggccgcagcu

SEQ ID NO: 9716 - RNA, 22 nt, Artificial Sequence
  SARM1 targeting guide sequence portion
gggagcucacggagcucaagac

SEQ ID NO: 9717 - RNA, 22 nt, Artificial Sequence
  SARM1 targeting guide sequence portion
gggcagccuggacccgcgcuuc

SEQ ID NO: 9718 - RNA, 22 nt, Artificial Sequence
  SARM1 targeting guide sequence portion
gggcgcggugcacgcccaggug

SEQ ID NO: 9719 - RNA, 22 nt, Artificial Sequence
  SARM1 targeting guide sequence portion
gggcgugcaccgcgcccgcauc

SEQ ID NO: 9720 - RNA, 22 nt, Artificial Sequence
  SARM1 targeting guide sequence portion
ggguccaggcugcccagccagu

SEQ ID NO: 9721 - RNA, 22 nt, Artificial Sequence
  SARM1 targeting guide sequence portion
ggucagcugcggccuggaccgc

SEQ ID NO: 9722 - RNA, 22 nt, Artificial Sequence
  SARM1 targeting guide sequence portion
gguccaggccgcagcugaccag

SEQ ID NO: 9723 - RNA, 22 nt, Artificial Sequence
  SARM1 targeting guide sequence portion
gguccaggcugcccagccaguc

SEQ ID NO: 9724 - RNA, 22 nt, Artificial Sequence
  SARM1 targeting guide sequence portion
ggucgcacguagaauaguuggc

SEQ ID NO: 9725 - RNA, 22 nt, Artificial Sequence
  SARM1 targeting guide sequence portion
ggucuugagcuccgugagcucc

SEQ ID NO: 9726 - RNA, 22 nt, Artificial Sequence
  SARM1 targeting guide sequence portion
ggugcacgcccagguggaugcc

SEQ ID NO: 9727 - RNA, 22 nt, Artificial Sequence
  SARM1 targeting guide sequence portion
ggugcagcagggagcgguccag

SEQ ID NO: 9728 - RNA, 22 nt, Artificial Sequence
  SARM1 targeting guide sequence portion
ggugcagguucuuuagggagcu

SEQ ID NO: 9729 - RNA, 22 nt, Artificial Sequence
  SARM1 targeting guide sequence portion
gguggaugccgcagucuuccag

SEQ ID NO: 9730 - RNA, 22 nt, Artificial Sequence
  SARM1 targeting guide sequence portion
gguguacuggcggaagcgcggg

SEQ ID NO: 9731 - RNA, 22 nt, Artificial Sequence
  SARM1 targeting guide sequence portion
gguucuuuagggagcucacgga

SEQ ID NO: 9732 - RNA, 22 nt, Artificial Sequence
  SARM1 targeting guide sequence portion
gguugcugcggucgcacguaga

SEQ ID NO: 9733 - RNA, 22 nt, Artificial Sequence
  SARM1 targeting guide sequence portion
guacaccuacggccuggucagc

SEQ ID NO: 9734 - RNA, 22 nt, Artificial Sequence
  SARM1 targeting guide sequence portion
guacuggcggaagcgcgggucc

SEQ ID NO: 9735 - RNA, 22 nt, Artificial Sequence
  SARM1 targeting guide sequence portion
guagaauaguuggcgaaggucu

SEQ ID NO: 9736 - RNA, 22 nt, Artificial Sequence
  SARM1 targeting guide sequence portion
guagguguacuggcggaagcgc

SEQ ID NO: 9737 - RNA, 22 nt, Artificial Sequence
  SARM1 targeting guide sequence portion
gucagcugcggccuggaccgcu

SEQ ID NO: 9738 - RNA, 22 nt, Artificial Sequence
  SARM1 targeting guide sequence portion
guccaggccgcagcugaccagg

SEQ ID NO: 9739 - RNA, 22 nt, Artificial Sequence
  SARM1 targeting guide sequence portion
guccaggcugcccagccagucc

SEQ ID NO: 9740 - RNA, 22 nt, Artificial Sequence
  SARM1 targeting guide sequence portion
guccgccagguugcugcggucg

SEQ ID NO: 9741 - RNA, 22 nt, Artificial Sequence
  SARM1 targeting guide sequence portion
gucgcacguagaauaguuggcg

SEQ ID NO: 9742 - RNA, 22 nt, Artificial Sequence
  SARM1 targeting guide sequence portion
gucugagcagcagcugcuggaa

SEQ ID NO: 9743 - RNA, 22 nt, Artificial Sequence
  SARM1 targeting guide sequence portion
gucuuccagcagcugcugcuca

SEQ ID NO: 9744 - RNA, 22 nt, Artificial Sequence
  SARM1 targeting guide sequence portion
gucuugagcuccgugagcuccc

SEQ ID NO: 9745 - RNA, 22 nt, Artificial Sequence
  SARM1 targeting guide sequence portion
gugaggaugcgggcgcggugca

SEQ ID NO: 9746 - RNA, 22 nt, Artificial Sequence
  SARM1 targeting guide sequence portion
gugcaccgcgcccgcauccuca

SEQ ID NO: 9747 - RNA, 22 nt, Artificial Sequence
  SARM1 targeting guide sequence portion
gugcacgcccagguggaugccg

SEQ ID NO: 9748 - RNA, 22 nt, Artificial Sequence
  SARM1 targeting guide sequence portion
gugcagcagggagcgguccagg

SEQ ID NO: 9749 - RNA, 22 nt, Artificial Sequence
  SARM1 targeting guide sequence portion
gugcagguucuuuagggagcuc

SEQ ID NO: 9750 - RNA, 22 nt, Artificial Sequence
  SARM1 targeting guide sequence portion
gugcgaccgcagcaaccuggcg

SEQ ID NO: 9751 - RNA, 22 nt, Artificial Sequence
  SARM1 targeting guide sequence portion
guggaugccgcagucuuccagc

SEQ ID NO: 9752 - RNA, 22 nt, Artificial Sequence
  SARM1 targeting guide sequence portion
guguacuggcggaagcgcgggu

SEQ ID NO: 9753 - RNA, 22 nt, Artificial Sequence
  SARM1 targeting guide sequence portion
gugucugagcagcagcugcugg

SEQ ID NO: 9754 - RNA, 22 nt, Artificial Sequence
  SARM1 targeting guide sequence portion
guucuuuagggagcucacggag

SEQ ID NO: 9755 - RNA, 22 nt, Artificial Sequence
  SARM1 targeting guide sequence portion
guugcugcggucgcacguagaa

SEQ ID NO: 9756 - RNA, 22 nt, Artificial Sequence
  SARM1 targeting guide sequence portion
guuggcgaaggucuugagcucc

SEQ ID NO: 9757 - RNA, 22 nt, Artificial Sequence
  SARM1 targeting guide sequence portion
uacaccuacggccuggucagcu

SEQ ID NO: 9758 - RNA, 22 nt, Artificial Sequence
  SARM1 targeting guide sequence portion
uacggccuggucagcugcggcc

SEQ ID NO: 9759 - RNA, 22 nt, Artificial Sequence
  SARM1 targeting guide sequence portion
uacgugcgaccgcagcaaccug

SEQ ID NO: 9760 - RNA, 22 nt, Artificial Sequence
  SARM1 targeting guide sequence portion
uacuggcggaagcgcgggucca

SEQ ID NO: 9761 - RNA, 22 nt, Artificial Sequence
  SARM1 targeting guide sequence portion
uagaauaguuggcgaaggucuu

SEQ ID NO: 9762 - RNA, 22 nt, Artificial Sequence
  SARM1 targeting guide sequence portion
uagggagcucacggagcucaag

SEQ ID NO: 9763 - RNA, 22 nt, Artificial Sequence
  SARM1 targeting guide sequence portion
uagguguacuggcggaagcgcg

SEQ ID NO: 9764 - RNA, 22 nt, Artificial Sequence
  SARM1 targeting guide sequence portion
uaguuggcgaaggucuugagcu

SEQ ID NO: 9765 - RNA, 22 nt, Artificial Sequence
  SARM1 targeting guide sequence portion
uauucuacgugcgaccgcagca

SEQ ID NO: 9766 - RNA, 22 nt, Artificial Sequence
  SARM1 targeting guide sequence portion
ucaagaccuucgccaacuauuc

SEQ ID NO: 9767 - RNA, 22 nt, Artificial Sequence
  SARM1 targeting guide sequence portion
ucacggagcucaagaccuucgc

SEQ ID NO: 9768 - RNA, 22 nt, Artificial Sequence
  SARM1 targeting guide sequence portion
ucagacacgcggugcagcaggg

SEQ ID NO: 9769 - RNA, 22 nt, Artificial Sequence
  SARM1 targeting guide sequence portion
ucagcugcggccuggaccgcuc

SEQ ID NO: 9770 - RNA, 22 nt, Artificial Sequence
  SARM1 targeting guide sequence portion
uccaccugggcgugcaccgcgc

SEQ ID NO: 9771 - RNA, 22 nt, Artificial Sequence
  SARM1 targeting guide sequence portion
uccagcagcugcugcucagaca

SEQ ID NO: 9772 - RNA, 22 nt, Artificial Sequence
  SARM1 targeting guide sequence portion
uccaggccgcagcugaccaggc

SEQ ID NO: 9773 - RNA, 22 nt, Artificial Sequence
  SARM1 targeting guide sequence portion
uccaggcugcccagccaguccg

SEQ ID NO: 9774 - RNA, 22 nt, Artificial Sequence
  SARM1 targeting guide sequence portion
ucccugcugcaccgcgugucug

SEQ ID NO: 9775 - RNA, 22 nt, Artificial Sequence
  SARM1 targeting guide sequence portion
uccgccagguugcugcggucgc

SEQ ID NO: 9776 - RNA, 22 nt, Artificial Sequence
  SARM1 targeting guide sequence portion
uccgccaguacaccuacggccu

SEQ ID NO: 9777 - RNA, 22 nt, Artificial Sequence
  SARM1 targeting guide sequence portion
uccgugagcucccuaaagaacc

SEQ ID NO: 9778 - RNA, 22 nt, Artificial Sequence
  SARM1 targeting guide sequence portion
ucgcacguagaauaguuggcga

SEQ ID NO: 9779 - RNA, 22 nt, Artificial Sequence
  SARM1 targeting guide sequence portion
ucgccaacuauucuacgugcga

SEQ ID NO: 9780 - RNA, 22 nt, Artificial Sequence
  SARM1 targeting guide sequence portion
ucuacgugcgaccgcagcaacc

SEQ ID NO: 9781 - RNA, 22 nt, Artificial Sequence
  SARM1 targeting guide sequence portion
ucugagcagcagcugcuggaag

SEQ ID NO: 9782 - RNA, 22 nt, Artificial Sequence
  SARM1 targeting guide sequence portion
ucuggccgccgugaggaugcgg

SEQ ID NO: 9783 - RNA, 22 nt, Artificial Sequence
  SARM1 targeting guide sequence portion
ucuuccagcagcugcugcucag

SEQ ID NO: 9784 - RNA, 22 nt, Artificial Sequence
  SARM1 targeting guide sequence portion
ucuugagcuccgugagcucccu

SEQ ID NO: 9785 - RNA, 22 nt, Artificial Sequence
  SARM1 targeting guide sequence portion
ucuuuagggagcucacggagcu

SEQ ID NO: 9786 - RNA, 22 nt, Artificial Sequence
  SARM1 targeting guide sequence portion
ugaccaggccguagguguacug

SEQ ID NO: 9787 - RNA, 22 nt, Artificial Sequence
  SARM1 targeting guide sequence portion
ugaccucuggccgccgugagga

SEQ ID NO: 9788 - RNA, 22 nt, Artificial Sequence
  SARM1 targeting guide sequence portion
ugagcagcagcugcuggaagac

SEQ ID NO: 9789 - RNA, 22 nt, Artificial Sequence
  SARM1 targeting guide sequence portion
ugagcuccgugagcucccuaaa

SEQ ID NO: 9790 - RNA, 22 nt, Artificial Sequence
  SARM1 targeting guide sequence portion
ugaggaugcgggcgcggugcac

SEQ ID NO: 9791 - RNA, 22 nt, Artificial Sequence
  SARM1 targeting guide sequence portion
ugcaccgcgcccgcauccucac

SEQ ID NO: 9792 - RNA, 22 nt, Artificial Sequence
  SARM1 targeting guide sequence portion
ugcaccgcgugucugagcagca

SEQ ID NO: 9793 - RNA, 22 nt, Artificial Sequence
  SARM1 targeting guide sequence portion
ugcacgcccagguggaugccgc

SEQ ID NO: 9794 - RNA, 22 nt, Artificial Sequence
  SARM1 targeting guide sequence portion
ugcagcagggagcgguccaggc

SEQ ID NO: 9795 - RNA, 22 nt, Artificial Sequence
  SARM1 targeting guide sequence portion
ugcagguucuuuagggagcuca

SEQ ID NO: 9796 - RNA, 22 nt, Artificial Sequence
  SARM1 targeting guide sequence portion
ugcccagccaguccgccagguu

SEQ ID NO: 9797 - RNA, 22 nt, Artificial Sequence
  SARM1 targeting guide sequence portion
ugccgcagucuuccagcagcug

SEQ ID NO: 9798 - RNA, 22 nt, Artificial Sequence
  SARM1 targeting guide sequence portion
ugcgaccgcagcaaccuggcgg

SEQ ID NO: 9799 - RNA, 22 nt, Artificial Sequence
  SARM1 targeting guide sequence portion
ugcggcauccaccugggcgugc

SEQ ID NO: 9800 - RNA, 22 nt, Artificial Sequence
  SARM1 targeting guide sequence portion
ugcggccuggaccgcucccugc

SEQ ID NO: 9801 - RNA, 22 nt, Artificial Sequence
  SARM1 targeting guide sequence portion
ugcgggcgcggugcacgcccag

SEQ ID NO: 9802 - RNA, 22 nt, Artificial Sequence
  SARM1 targeting guide sequence portion
ugcggucgcacguagaauaguu

SEQ ID NO: 9803 - RNA, 22 nt, Artificial Sequence
  SARM1 targeting guide sequence portion
ugcucagacacgcggugcagca

SEQ ID NO: 9804 - RNA, 22 nt, Artificial Sequence
  SARM1 targeting guide sequence portion
ugcugcaccgcgugucugagca

SEQ ID NO: 9805 - RNA, 22 nt, Artificial Sequence
  SARM1 targeting guide sequence portion
ugcugcggucgcacguagaaua

SEQ ID NO: 9806 - RNA, 22 nt, Artificial Sequence
  SARM1 targeting guide sequence portion
ugcugcucagacacgcggugca

SEQ ID NO: 9807 - RNA, 22 nt, Artificial Sequence
  SARM1 targeting guide sequence portion
ugcuggaagacugcggcaucca

SEQ ID NO: 9808 - RNA, 22 nt, Artificial Sequence
  SARM1 targeting guide sequence portion
uggaagacugcggcauccaccu

SEQ ID NO: 9809 - RNA, 22 nt, Artificial Sequence
  SARM1 targeting guide sequence portion
uggacccgcgcuuccgccagua

SEQ ID NO: 9810 - RNA, 22 nt, Artificial Sequence
  SARM1 targeting guide sequence portion
uggaccgcucccugcugcaccg

SEQ ID NO: 9811 - RNA, 22 nt, Artificial Sequence
  SARM1 targeting guide sequence portion
uggaugccgcagucuuccagca

SEQ ID NO: 9812 - RNA, 22 nt, Artificial Sequence
  SARM1 targeting guide sequence portion
uggccgccgugaggaugcgggc

SEQ ID NO: 9813 - RNA, 22 nt, Artificial Sequence
  SARM1 targeting guide sequence portion
uggcgaaggucuugagcuccgu

SEQ ID NO: 9814 - RNA, 22 nt, Artificial Sequence
  SARM1 targeting guide sequence portion
uggcggaagcgcggguccaggc

SEQ ID NO: 9815 - RNA, 22 nt, Artificial Sequence
  SARM1 targeting guide sequence portion
uggcggacuggcugggcagccu

SEQ ID NO: 9816 - RNA, 22 nt, Artificial Sequence
  SARM1 targeting guide sequence portion
uggcugggcagccuggacccgc

SEQ ID NO: 9817 - RNA, 22 nt, Artificial Sequence
  SARM1 targeting guide sequence portion
ugggcagccuggacccgcgcuu

SEQ ID NO: 9818 - RNA, 22 nt, Artificial Sequence
  SARM1 targeting guide sequence portion
ugggcgugcaccgcgcccgcau

SEQ ID NO: 9819 - RNA, 22 nt, Artificial Sequence
  SARM1 targeting guide sequence portion
uggucagcugcggccuggaccg

SEQ ID NO: 9820 - RNA, 22 nt, Artificial Sequence
  SARM1 targeting guide sequence portion
uguacuggcggaagcgcggguc

SEQ ID NO: 9821 - RNA, 22 nt, Artificial Sequence
  SARM1 targeting guide sequence portion
ugucugagcagcagcugcugga

SEQ ID NO: 9822 - RNA, 22 nt, Artificial Sequence
  SARM1 targeting guide sequence portion
uuagggagcucacggagcucaa

SEQ ID NO: 9823 - RNA, 22 nt, Artificial Sequence
  SARM1 targeting guide sequence portion
uuccagcagcugcugcucagac

SEQ ID NO: 9824 - RNA, 22 nt, Artificial Sequence
  SARM1 targeting guide sequence portion
uuccgccaguacaccuacggcc

SEQ ID NO: 9825 - RNA, 22 nt, Artificial Sequence
  SARM1 targeting guide sequence portion
uucgccaacuauucuacgugcg

SEQ ID NO: 9826 - RNA, 22 nt, Artificial Sequence
  SARM1 targeting guide sequence portion
uucuacgugcgaccgcagcaac

SEQ ID NO: 9827 - RNA, 22 nt, Artificial Sequence
  SARM1 targeting guide sequence portion
uucuuuagggagcucacggagc

SEQ ID NO: 9828 - RNA, 22 nt, Artificial Sequence
  SARM1 targeting guide sequence portion
uugagcuccgugagcucccuaa

SEQ ID NO: 9829 - RNA, 22 nt, Artificial Sequence
  SARM1 targeting guide sequence portion
uugcugcggucgcacguagaau

SEQ ID NO: 9830 - RNA, 22 nt, Artificial Sequence
  SARM1 targeting guide sequence portion
uuggcgaaggucuugagcuccg

SEQ ID NO: 9831 - RNA, 22 nt, Artificial Sequence
  SARM1 targeting guide sequence portion
uuuagggagcucacggagcuca

SEQ ID NO: 9832 - RNA, 20 nt, Artificial Sequence
  SARM1 targeting guide sequence portion
aaacccaguggggacacucc

SEQ ID NO: 9833 - RNA, 20 nt, Artificial Sequence
  SARM1 targeting guide sequence portion
aaaugcuacacuccccgcug

SEQ ID NO: 9834 - RNA, 20 nt, Artificial Sequence
  SARM1 targeting guide sequence portion
aacccaguggggacacucca

SEQ ID NO: 9835 - RNA, 20 nt, Artificial Sequence
  SARM1 targeting guide sequence portion
aaccugaguuccggcgguag

SEQ ID NO: 9836 - RNA, 20 nt, Artificial Sequence
  SARM1 targeting guide sequence portion
aacucagguucccagcuggc

SEQ ID NO: 9837 - RNA, 20 nt, Artificial Sequence
  SARM1 targeting guide sequence portion
aagacaucuggagugucccc

SEQ ID NO: 9838 - RNA, 20 nt, Artificial Sequence
  SARM1 targeting guide sequence portion
aaugcuacacuccccgcugc

SEQ ID NO: 9839 - RNA, 20 nt, Artificial Sequence
  SARM1 targeting guide sequence portion
acacuccagaugucuucauc

SEQ ID NO: 9840 - RNA, 20 nt, Artificial Sequence
  SARM1 targeting guide sequence portion
acacuccccgcugcccugua

SEQ ID NO: 9841 - RNA, 20 nt, Artificial Sequence
  SARM1 targeting guide sequence portion
acagggcagcggggagugua

SEQ ID NO: 9842 - RNA, 20 nt, Artificial Sequence
  SARM1 targeting guide sequence portion
acaucuggaguguccccacu

SEQ ID NO: 9843 - RNA, 20 nt, Artificial Sequence
  SARM1 targeting guide sequence portion
accaguacagggcagcgggg

SEQ ID NO: 9844 - RNA, 20 nt, Artificial Sequence
  SARM1 targeting guide sequence portion
acccaguggggacacuccag

SEQ ID NO: 9845 - RNA, 20 nt, Artificial Sequence
  SARM1 targeting guide sequence portion
accgccggaacucagguucc

SEQ ID NO: 9846 - RNA, 20 nt, Artificial Sequence
  SARM1 targeting guide sequence portion
accugaguuccggcgguagc

SEQ ID NO: 9847 - RNA, 20 nt, Artificial Sequence
  SARM1 targeting guide sequence portion
accuggccagcugggaaccu

SEQ ID NO: 9848 - RNA, 20 nt, Artificial Sequence
  SARM1 targeting guide sequence portion
acucagguucccagcuggcc

SEQ ID NO: 9849 - RNA, 20 nt, Artificial Sequence
  SARM1 targeting guide sequence portion
acuccagaugucuucaucag

SEQ ID NO: 9850 - RNA, 20 nt, Artificial Sequence
  SARM1 targeting guide sequence portion
acuccccgcugcccuguacu

SEQ ID NO: 9851 - RNA, 20 nt, Artificial Sequence
  SARM1 targeting guide sequence portion
acuggguuugccaccaguac

SEQ ID NO: 9852 - RNA, 20 nt, Artificial Sequence
  SARM1 targeting guide sequence portion
acugguggcaaacccagugg

SEQ ID NO: 9853 - RNA, 20 nt, Artificial Sequence
  SARM1 targeting guide sequence portion
acuucagaaaugcuacacuc

SEQ ID NO: 9854 - RNA, 20 nt, Artificial Sequence
  SARM1 targeting guide sequence portion
agaaaugcuacacuccccgc

SEQ ID NO: 9855 - RNA, 20 nt, Artificial Sequence
  SARM1 targeting guide sequence portion
agacaucuggagugucccca

SEQ ID NO: 9856 - RNA, 20 nt, Artificial Sequence
  SARM1 targeting guide sequence portion
agaugucuucaucagcuacc

SEQ ID NO: 9857 - RNA, 20 nt, Artificial Sequence
  SARM1 targeting guide sequence portion
agcggggaguguagcauuuc

SEQ ID NO: 9858 - RNA, 20 nt, Artificial Sequence
  SARM1 targeting guide sequence portion
agcuaccgccggaacucagg

SEQ ID NO: 9859 - RNA, 20 nt, Artificial Sequence
  SARM1 targeting guide sequence portion
agcugaugaagacaucugga

SEQ ID NO: 9860 - RNA, 20 nt, Artificial Sequence
  SARM1 targeting guide sequence portion
agcugggaaccugaguuccg

SEQ ID NO: 9861 - RNA, 20 nt, Artificial Sequence
  SARM1 targeting guide sequence portion
agggcagcggggaguguagc

SEQ ID NO: 9862 - RNA, 20 nt, Artificial Sequence
  SARM1 targeting guide sequence portion
aguacagggcagcggggagu

SEQ ID NO: 9863 - RNA, 20 nt, Artificial Sequence
  SARM1 targeting guide sequence portion
aguggggacacuccagaugu

SEQ ID NO: 9864 - RNA, 20 nt, Artificial Sequence
  SARM1 targeting guide sequence portion
aguguccccacuggguuugc

SEQ ID NO: 9865 - RNA, 20 nt, Artificial Sequence
  SARM1 targeting guide sequence portion
aguuccggcgguagcugaug

SEQ ID NO: 9866 - RNA, 20 nt, Artificial Sequence
  SARM1 targeting guide sequence portion
aucagcuaccgccggaacuc

SEQ ID NO: 9867 - RNA, 20 nt, Artificial Sequence
  SARM1 targeting guide sequence portion
aucuggaguguccccacugg

SEQ ID NO: 9868 - RNA, 20 nt, Artificial Sequence
  SARM1 targeting guide sequence portion
augaagacaucuggaguguc

SEQ ID NO: 9869 - RNA, 20 nt, Artificial Sequence
  SARM1 targeting guide sequence portion
augcuacacuccccgcugcc

SEQ ID NO: 9870 - RNA, 20 nt, Artificial Sequence
  SARM1 targeting guide sequence portion
augucuucaucagcuaccgc

SEQ ID NO: 9871 - RNA, 20 nt, Artificial Sequence
  SARM1 targeting guide sequence portion
caaacccaguggggacacuc

SEQ ID NO: 9872 - RNA, 20 nt, Artificial Sequence
  SARM1 targeting guide sequence portion
caccaguacagggcagcggg

SEQ ID NO: 9873 - RNA, 20 nt, Artificial Sequence
  SARM1 targeting guide sequence portion
caccuggccagcugggaacc

SEQ ID NO: 9874 - RNA, 20 nt, Artificial Sequence
  SARM1 targeting guide sequence portion
cacuccagaugucuucauca

SEQ ID NO: 9875 - RNA, 20 nt, Artificial Sequence
  SARM1 targeting guide sequence portion
cacuccccgcugcccuguac

SEQ ID NO: 9876 - RNA, 20 nt, Artificial Sequence
  SARM1 targeting guide sequence portion
cacuggguuugccaccagua

SEQ ID NO: 9877 - RNA, 20 nt, Artificial Sequence
  SARM1 targeting guide sequence portion
cagaaaugcuacacuccccg

SEQ ID NO: 9878 - RNA, 20 nt, Artificial Sequence
  SARM1 targeting guide sequence portion
cagaugucuucaucagcuac

SEQ ID NO: 9879 - RNA, 20 nt, Artificial Sequence
  SARM1 targeting guide sequence portion
cagcggggaguguagcauuu

SEQ ID NO: 9880 - RNA, 20 nt, Artificial Sequence
  SARM1 targeting guide sequence portion
cagcuaccgccggaacucag

SEQ ID NO: 9881 - RNA, 20 nt, Artificial Sequence
  SARM1 targeting guide sequence portion
cagcugggaaccugaguucc

SEQ ID NO: 9882 - RNA, 20 nt, Artificial Sequence
  SARM1 targeting guide sequence portion
cagggcagcggggaguguag

SEQ ID NO: 9883 - RNA, 20 nt, Artificial Sequence
  SARM1 targeting guide sequence portion
cagguucccagcuggccagg

SEQ ID NO: 9884 - RNA, 20 nt, Artificial Sequence
  SARM1 targeting guide sequence portion
caguacagggcagcggggag

SEQ ID NO: 9885 - RNA, 20 nt, Artificial Sequence
  SARM1 targeting guide sequence portion
caguggggacacuccagaug

SEQ ID NO: 9886 - RNA, 20 nt, Artificial Sequence
  SARM1 targeting guide sequence portion
caucagcuaccgccggaacu

SEQ ID NO: 9887 - RNA, 20 nt, Artificial Sequence
  SARM1 targeting guide sequence portion
caucuggaguguccccacug

SEQ ID NO: 9888 - RNA, 20 nt, Artificial Sequence
  SARM1 targeting guide sequence portion
ccaccaguacagggcagcgg

SEQ ID NO: 9889 - RNA, 20 nt, Artificial Sequence
  SARM1 targeting guide sequence portion
ccacuggguuugccaccagu

SEQ ID NO: 9890 - RNA, 20 nt, Artificial Sequence
  SARM1 targeting guide sequence portion
ccagaugucuucaucagcua

SEQ ID NO: 9891 - RNA, 20 nt, Artificial Sequence
  SARM1 targeting guide sequence portion
ccagcugggaaccugaguuc

SEQ ID NO: 9892 - RNA, 20 nt, Artificial Sequence
  SARM1 targeting guide sequence portion
ccaguacagggcagcgggga

SEQ ID NO: 9893 - RNA, 20 nt, Artificial Sequence
  SARM1 targeting guide sequence portion
ccaguggggacacuccagau

SEQ ID NO: 9894 - RNA, 20 nt, Artificial Sequence
  SARM1 targeting guide sequence portion
cccacuggguuugccaccag

SEQ ID NO: 9895 - RNA, 20 nt, Artificial Sequence
  SARM1 targeting guide sequence portion
cccaguggggacacuccaga

SEQ ID NO: 9896 - RNA, 20 nt, Artificial Sequence
  SARM1 targeting guide sequence portion
ccccacuggguuugccacca

SEQ ID NO: 9897 - RNA, 20 nt, Artificial Sequence
  SARM1 targeting guide sequence portion
ccccgcugcccuguacuggu

SEQ ID NO: 9898 - RNA, 20 nt, Artificial Sequence
  SARM1 targeting guide sequence portion
cccgcugcccuguacuggug

SEQ ID NO: 9899 - RNA, 20 nt, Artificial Sequence
  SARM1 targeting guide sequence portion
cccuguacugguggcaaacc

SEQ ID NO: 9900 - RNA, 20 nt, Artificial Sequence
  SARM1 targeting guide sequence portion
ccgccggaacucagguuccc

SEQ ID NO: 9901 - RNA, 20 nt, Artificial Sequence
  SARM1 targeting guide sequence portion
ccgcugcccuguacuggugg

SEQ ID NO: 9902 - RNA, 20 nt, Artificial Sequence
  SARM1 targeting guide sequence portion
ccggaacucagguucccagc

SEQ ID NO: 9903 - RNA, 20 nt, Artificial Sequence
  SARM1 targeting guide sequence portion
ccggcgguagcugaugaaga

SEQ ID NO: 9904 - RNA, 20 nt, Artificial Sequence
  SARM1 targeting guide sequence portion
ccucaccuggccagcuggga

SEQ ID NO: 9905 - RNA, 20 nt, Artificial Sequence
  SARM1 targeting guide sequence portion
ccugaguuccggcgguagcu

SEQ ID NO: 9906 - RNA, 20 nt, Artificial Sequence
  SARM1 targeting guide sequence portion
ccuggccagcugggaaccug

SEQ ID NO: 9907 - RNA, 20 nt, Artificial Sequence
  SARM1 targeting guide sequence portion
ccuguacugguggcaaaccc

SEQ ID NO: 9908 - RNA, 20 nt, Artificial Sequence
  SARM1 targeting guide sequence portion
cgccggaacucagguuccca

SEQ ID NO: 9909 - RNA, 20 nt, Artificial Sequence
  SARM1 targeting guide sequence portion
cgcugcccuguacugguggc

SEQ ID NO: 9910 - RNA, 20 nt, Artificial Sequence
  SARM1 targeting guide sequence portion
cggaacucagguucccagcu

SEQ ID NO: 9911 - RNA, 20 nt, Artificial Sequence
  SARM1 targeting guide sequence portion
cggcgguagcugaugaagac

SEQ ID NO: 9912 - RNA, 20 nt, Artificial Sequence
  SARM1 targeting guide sequence portion
cgguagcugaugaagacauc

SEQ ID NO: 9913 - RNA, 20 nt, Artificial Sequence
  SARM1 targeting guide sequence portion
cuacacuccccgcugcccug

SEQ ID NO: 9914 - RNA, 20 nt, Artificial Sequence
  SARM1 targeting guide sequence portion
cuaccgccggaacucagguu

SEQ ID NO: 9915 - RNA, 20 nt, Artificial Sequence
  SARM1 targeting guide sequence portion
cucaccuggccagcugggaa

SEQ ID NO: 9916 - RNA, 20 nt, Artificial Sequence
  SARM1 targeting guide sequence portion
cucagguucccagcuggcca

SEQ ID NO: 9917 - RNA, 20 nt, Artificial Sequence
  SARM1 targeting guide sequence portion
cuccagaugucuucaucagc

SEQ ID NO: 9918 - RNA, 20 nt, Artificial Sequence
  SARM1 targeting guide sequence portion
cuccccgcugcccuguacug

SEQ ID NO: 9919 - RNA, 20 nt, Artificial Sequence
  SARM1 targeting guide sequence portion
cugaguuccggcgguagcug

SEQ ID NO: 9920 - RNA, 20 nt, Artificial Sequence
  SARM1 targeting guide sequence portion
cugaugaagacaucuggagu

SEQ ID NO: 9921 - RNA, 20 nt, Artificial Sequence
  SARM1 targeting guide sequence portion
cugcccuguacugguggcaa

SEQ ID NO: 9922 - RNA, 20 nt, Artificial Sequence
  SARM1 targeting guide sequence portion
cuggaguguccccacugggu

SEQ ID NO: 9923 - RNA, 20 nt, Artificial Sequence
  SARM1 targeting guide sequence portion
cuggccagcugggaaccuga

SEQ ID NO: 9924 - RNA, 20 nt, Artificial Sequence
  SARM1 targeting guide sequence portion
cugggaaccugaguuccggc

SEQ ID NO: 9925 - RNA, 20 nt, Artificial Sequence
  SARM1 targeting guide sequence portion
cuggguuugccaccaguaca

SEQ ID NO: 9926 - RNA, 20 nt, Artificial Sequence
  SARM1 targeting guide sequence portion
cugguggcaaacccaguggg

SEQ ID NO: 9927 - RNA, 20 nt, Artificial Sequence
  SARM1 targeting guide sequence portion
cuguacugguggcaaaccca

SEQ ID NO: 9928 - RNA, 20 nt, Artificial Sequence
  SARM1 targeting guide sequence portion
cuucagaaaugcuacacucc

SEQ ID NO: 9929 - RNA, 20 nt, Artificial Sequence
  SARM1 targeting guide sequence portion
cuucaucagcuaccgccgga

SEQ ID NO: 9930 - RNA, 20 nt, Artificial Sequence
  SARM1 targeting guide sequence portion
gaaaugcuacacuccccgcu

SEQ ID NO: 9931 - RNA, 20 nt, Artificial Sequence
  SARM1 targeting guide sequence portion
gaaccugaguuccggcggua

SEQ ID NO: 9932 - RNA, 20 nt, Artificial Sequence
  SARM1 targeting guide sequence portion
gaacucagguucccagcugg

SEQ ID NO: 9933 - RNA, 20 nt, Artificial Sequence
  SARM1 targeting guide sequence portion
gaagacaucuggaguguccc

SEQ ID NO: 9934 - RNA, 20 nt, Artificial Sequence
  SARM1 targeting guide sequence portion
gacacuccagaugucuucau

SEQ ID NO: 9935 - RNA, 20 nt, Artificial Sequence
  SARM1 targeting guide sequence portion
gacaucuggaguguccccac

SEQ ID NO: 9936 - RNA, 20 nt, Artificial Sequence
  SARM1 targeting guide sequence portion
gaguguccccacuggguuug

SEQ ID NO: 9937 - RNA, 20 nt, Artificial Sequence
  SARM1 targeting guide sequence portion
gaguuccggcgguagcugau

SEQ ID NO: 9938 - RNA, 20 nt, Artificial Sequence
  SARM1 targeting guide sequence portion
gaugaagacaucuggagugu

SEQ ID NO: 9939 - RNA, 20 nt, Artificial Sequence
  SARM1 targeting guide sequence portion
gaugucuucaucagcuaccg

SEQ ID NO: 9940 - RNA, 20 nt, Artificial Sequence
  SARM1 targeting guide sequence portion
gcaaacccaguggggacacu

SEQ ID NO: 9941 - RNA, 20 nt, Artificial Sequence
  SARM1 targeting guide sequence portion
gcagcggggaguguagcauu

SEQ ID NO: 9942 - RNA, 20 nt, Artificial Sequence
  SARM1 targeting guide sequence portion
gccaccaguacagggcagcg

SEQ ID NO: 9943 - RNA, 20 nt, Artificial Sequence
  SARM1 targeting guide sequence portion
gccagcugggaaccugaguu

SEQ ID NO: 9944 - RNA, 20 nt, Artificial Sequence
  SARM1 targeting guide sequence portion
gcccuguacugguggcaaac

SEQ ID NO: 9945 - RNA, 20 nt, Artificial Sequence
  SARM1 targeting guide sequence portion
gccggaacucagguucccag

SEQ ID NO: 9946 - RNA, 20 nt, Artificial Sequence
  SARM1 targeting guide sequence portion
gcgguagcugaugaagacau

SEQ ID NO: 9947 - RNA, 20 nt, Artificial Sequence
  SARM1 targeting guide sequence portion
gcuacacuccccgcugcccu

SEQ ID NO: 9948 - RNA, 20 nt, Artificial Sequence
  SARM1 targeting guide sequence portion
gcuaccgccggaacucaggu

SEQ ID NO: 9949 - RNA, 20 nt, Artificial Sequence
  SARM1 targeting guide sequence portion
gcugaugaagacaucuggag

SEQ ID NO: 9950 - RNA, 20 nt, Artificial Sequence
  SARM1 targeting guide sequence portion
gcugcccuguacugguggca

SEQ ID NO: 9951 - RNA, 20 nt, Artificial Sequence
  SARM1 targeting guide sequence portion
gcugggaaccugaguuccgg

SEQ ID NO: 9952 - RNA, 20 nt, Artificial Sequence
  SARM1 targeting guide sequence portion
ggaaccugaguuccggcggu

SEQ ID NO: 9953 - RNA, 20 nt, Artificial Sequence
  SARM1 targeting guide sequence portion
ggaacucagguucccagcug

SEQ ID NO: 9954 - RNA, 20 nt, Artificial Sequence
  SARM1 targeting guide sequence portion
ggacacuccagaugucuuca

SEQ ID NO: 9955 - RNA, 20 nt, Artificial Sequence
  SARM1 targeting guide sequence portion
ggaguguccccacuggguuu

SEQ ID NO: 9956 - RNA, 20 nt, Artificial Sequence
  SARM1 targeting guide sequence portion
ggcaaacccaguggggacac

SEQ ID NO: 9957 - RNA, 20 nt, Artificial Sequence
  SARM1 targeting guide sequence portion
ggcagcggggaguguagcau

SEQ ID NO: 9958 - RNA, 20 nt, Artificial Sequence
  SARM1 targeting guide sequence portion
ggccagcugggaaccugagu

SEQ ID NO: 9959 - RNA, 20 nt, Artificial Sequence
  SARM1 targeting guide sequence portion
ggcgguagcugaugaagaca

SEQ ID NO: 9960 - RNA, 20 nt, Artificial Sequence
  SARM1 targeting guide sequence portion
gggaaccugaguuccggcgg

SEQ ID NO: 9961 - RNA, 20 nt, Artificial Sequence
  SARM1 targeting guide sequence portion
gggacacuccagaugucuuc

SEQ ID NO: 9962 - RNA, 20 nt, Artificial Sequence
  SARM1 targeting guide sequence portion
gggcagcggggaguguagca

SEQ ID NO: 9963 - RNA, 20 nt, Artificial Sequence
  SARM1 targeting guide sequence portion
ggggacacuccagaugucuu

SEQ ID NO: 9964 - RNA, 20 nt, Artificial Sequence
  SARM1 targeting guide sequence portion
ggguuugccaccaguacagg

SEQ ID NO: 9965 - RNA, 20 nt, Artificial Sequence
  SARM1 targeting guide sequence portion
gguagcugaugaagacaucu

SEQ ID NO: 9966 - RNA, 20 nt, Artificial Sequence
  SARM1 targeting guide sequence portion
gguggcaaacccagugggga

SEQ ID NO: 9967 - RNA, 20 nt, Artificial Sequence
  SARM1 targeting guide sequence portion
gguuugccaccaguacaggg

SEQ ID NO: 9968 - RNA, 20 nt, Artificial Sequence
  SARM1 targeting guide sequence portion
guacagggcagcggggagug

SEQ ID NO: 9969 - RNA, 20 nt, Artificial Sequence
  SARM1 targeting guide sequence portion
guacugguggcaaacccagu

SEQ ID NO: 9970 - RNA, 20 nt, Artificial Sequence
  SARM1 targeting guide sequence portion
guagcugaugaagacaucug

SEQ ID NO: 9971 - RNA, 20 nt, Artificial Sequence
  SARM1 targeting guide sequence portion
guccccacuggguuugccac

SEQ ID NO: 9972 - RNA, 20 nt, Artificial Sequence
  SARM1 targeting guide sequence portion
gucuucaucagcuaccgccg

SEQ ID NO: 9973 - RNA, 20 nt, Artificial Sequence
  SARM1 targeting guide sequence portion
guggcaaacccaguggggac

SEQ ID NO: 9974 - RNA, 20 nt, Artificial Sequence
  SARM1 targeting guide sequence portion
guggggacacuccagauguc

SEQ ID NO: 9975 - RNA, 20 nt, Artificial Sequence
  SARM1 targeting guide sequence portion
guguccccacuggguuugcc

SEQ ID NO: 9976 - RNA, 20 nt, Artificial Sequence
  SARM1 targeting guide sequence portion
guuccggcgguagcugauga

SEQ ID NO: 9977 - RNA, 20 nt, Artificial Sequence
  SARM1 targeting guide sequence portion
guuugccaccaguacagggc

SEQ ID NO: 9978 - RNA, 20 nt, Artificial Sequence
  SARM1 targeting guide sequence portion
uacacuccccgcugcccugu

SEQ ID NO: 9979 - RNA, 20 nt, Artificial Sequence
  SARM1 targeting guide sequence portion
uacagggcagcggggagugu

SEQ ID NO: 9980 - RNA, 20 nt, Artificial Sequence
  SARM1 targeting guide sequence portion
uaccgccggaacucagguuc

SEQ ID NO: 9981 - RNA, 20 nt, Artificial Sequence
  SARM1 targeting guide sequence portion
uacugguggcaaacccagug

SEQ ID NO: 9982 - RNA, 20 nt, Artificial Sequence
  SARM1 targeting guide sequence portion
uagcugaugaagacaucugg

SEQ ID NO: 9983 - RNA, 20 nt, Artificial Sequence
  SARM1 targeting guide sequence portion
ucaccuggccagcugggaac

SEQ ID NO: 9984 - RNA, 20 nt, Artificial Sequence
  SARM1 targeting guide sequence portion
ucagaaaugcuacacucccc

SEQ ID NO: 9985 - RNA, 20 nt, Artificial Sequence
  SARM1 targeting guide sequence portion
ucagcuaccgccggaacuca

SEQ ID NO: 9986 - RNA, 20 nt, Artificial Sequence
  SARM1 targeting guide sequence portion
ucagguucccagcuggccag

SEQ ID NO: 9987 - RNA, 20 nt, Artificial Sequence
  SARM1 targeting guide sequence portion
ucaucagcuaccgccggaac

SEQ ID NO: 9988 - RNA, 20 nt, Artificial Sequence
  SARM1 targeting guide sequence portion
uccagaugucuucaucagcu

SEQ ID NO: 9989 - RNA, 20 nt, Artificial Sequence
  SARM1 targeting guide sequence portion
uccccacuggguuugccacc

SEQ ID NO: 9990 - RNA, 20 nt, Artificial Sequence
  SARM1 targeting guide sequence portion
uccccgcugcccuguacugg

SEQ ID NO: 9991 - RNA, 20 nt, Artificial Sequence
  SARM1 targeting guide sequence portion
uccggcgguagcugaugaag

SEQ ID NO: 9992 - RNA, 20 nt, Artificial Sequence
  SARM1 targeting guide sequence portion
uccucaccuggccagcuggg

SEQ ID NO: 9993 - RNA, 20 nt, Artificial Sequence
  SARM1 targeting guide sequence portion
ucuggaguguccccacuggg

SEQ ID NO: 9994 - RNA, 20 nt, Artificial Sequence
  SARM1 targeting guide sequence portion
ucuucaucagcuaccgccgg

SEQ ID NO: 9995 - RNA, 20 nt, Artificial Sequence
  SARM1 targeting guide sequence portion
ugaagacaucuggagugucc

SEQ ID NO: 9996 - RNA, 20 nt, Artificial Sequence
  SARM1 targeting guide sequence portion
ugaguuccggcgguagcuga

SEQ ID NO: 9997 - RNA, 20 nt, Artificial Sequence
  SARM1 targeting guide sequence portion
ugaugaagacaucuggagug

SEQ ID NO: 9998 - RNA, 20 nt, Artificial Sequence
  SARM1 targeting guide sequence portion
ugccaccaguacagggcagc

SEQ ID NO: 9999 - RNA, 20 nt, Artificial Sequence
  SARM1 targeting guide sequence portion
ugcccuguacugguggcaaa

SEQ ID NO: 10000 - RNA, 20 nt, Artificial Sequence
  SARM1 targeting guide sequence portion
ugcuacacuccccgcugccc

SEQ ID NO: 10001 - RNA, 20 nt, Artificial Sequence
  SARM1 targeting guide sequence portion
uggaguguccccacuggguu

SEQ ID NO: 10002 - RNA, 20 nt, Artificial Sequence
  SARM1 targeting guide sequence portion
uggcaaacccaguggggaca

SEQ ID NO: 10003 - RNA, 20 nt, Artificial Sequence
  SARM1 targeting guide sequence portion
uggccagcugggaaccugag

SEQ ID NO: 10004 - RNA, 20 nt, Artificial Sequence
  SARM1 targeting guide sequence portion
ugggaaccugaguuccggcg

SEQ ID NO: 10005 - RNA, 20 nt, Artificial Sequence
  SARM1 targeting guide sequence portion
uggggacacuccagaugucu

SEQ ID NO: 10006 - RNA, 20 nt, Artificial Sequence
  SARM1 targeting guide sequence portion
uggguuugccaccaguacag

SEQ ID NO: 10007 - RNA, 20 nt, Artificial Sequence
  SARM1 targeting guide sequence portion
ugguggcaaacccagugggg

SEQ ID NO: 10008 - RNA, 20 nt, Artificial Sequence
  SARM1 targeting guide sequence portion
uguacugguggcaaacccag

SEQ ID NO: 10009 - RNA, 20 nt, Artificial Sequence
  SARM1 targeting guide sequence portion
uguccccacuggguuugcca

SEQ ID NO: 10010 - RNA, 20 nt, Artificial Sequence
  SARM1 targeting guide sequence portion
ugucuucaucagcuaccgcc

SEQ ID NO: 10011 - RNA, 20 nt, Artificial Sequence
  SARM1 targeting guide sequence portion
uucagaaaugcuacacuccc

SEQ ID NO: 10012 - RNA, 20 nt, Artificial Sequence
  SARM1 targeting guide sequence portion
uucaucagcuaccgccggaa

SEQ ID NO: 10013 - RNA, 20 nt, Artificial Sequence
  SARM1 targeting guide sequence portion
uuccggcgguagcugaugaa

SEQ ID NO: 10014 - RNA, 20 nt, Artificial Sequence
  SARM1 targeting guide sequence portion
uugccaccaguacagggcag

SEQ ID NO: 10015 - RNA, 20 nt, Artificial Sequence
  SARM1 targeting guide sequence portion
uuugccaccaguacagggca

SEQ ID NO: 10016 - RNA, 21 nt, Artificial Sequence
  SARM1 targeting guide sequence portion
aaacccaguggggacacucca

SEQ ID NO: 10017 - RNA, 21 nt, Artificial Sequence
  SARM1 targeting guide sequence portion
aaaugcuacacuccccgcugc

SEQ ID NO: 10018 - RNA, 21 nt, Artificial Sequence
  SARM1 targeting guide sequence portion
aacccaguggggacacuccag

SEQ ID NO: 10019 - RNA, 21 nt, Artificial Sequence
  SARM1 targeting guide sequence portion
aaccugaguuccggcgguagc

SEQ ID NO: 10020 - RNA, 21 nt, Artificial Sequence
  SARM1 targeting guide sequence portion
aacucagguucccagcuggcc

SEQ ID NO: 10021 - RNA, 21 nt, Artificial Sequence
  SARM1 targeting guide sequence portion
aagacaucuggagugucccca

SEQ ID NO: 10022 - RNA, 21 nt, Artificial Sequence
  SARM1 targeting guide sequence portion
aaugcuacacuccccgcugcc

SEQ ID NO: 10023 - RNA, 21 nt, Artificial Sequence
  SARM1 targeting guide sequence portion
acacuccagaugucuucauca

SEQ ID NO: 10024 - RNA, 21 nt, Artificial Sequence
  SARM1 targeting guide sequence portion
acacuccccgcugcccuguac

SEQ ID NO: 10025 - RNA, 21 nt, Artificial Sequence
  SARM1 targeting guide sequence portion
acagggcagcggggaguguag

SEQ ID NO: 10026 - RNA, 21 nt, Artificial Sequence
  SARM1 targeting guide sequence portion
acaucuggaguguccccacug

SEQ ID NO: 10027 - RNA, 21 nt, Artificial Sequence
  SARM1 targeting guide sequence portion
accaguacagggcagcgggga

SEQ ID NO: 10028 - RNA, 21 nt, Artificial Sequence
  SARM1 targeting guide sequence portion
acccaguggggacacuccaga

SEQ ID NO: 10029 - RNA, 21 nt, Artificial Sequence
  SARM1 targeting guide sequence portion
accgccggaacucagguuccc

SEQ ID NO: 10030 - RNA, 21 nt, Artificial Sequence
  SARM1 targeting guide sequence portion
accugaguuccggcgguagcu

SEQ ID NO: 10031 - RNA, 21 nt, Artificial Sequence
  SARM1 targeting guide sequence portion
accuggccagcugggaaccug

SEQ ID NO: 10032 - RNA, 21 nt, Artificial Sequence
  SARM1 targeting guide sequence portion
acucagguucccagcuggcca

SEQ ID NO: 10033 - RNA, 21 nt, Artificial Sequence
  SARM1 targeting guide sequence portion
acuccagaugucuucaucagc

SEQ ID NO: 10034 - RNA, 21 nt, Artificial Sequence
  SARM1 targeting guide sequence portion
acuccccgcugcccuguacug

SEQ ID NO: 10035 - RNA, 21 nt, Artificial Sequence
  SARM1 targeting guide sequence portion
acuggguuugccaccaguaca

SEQ ID NO: 10036 - RNA, 21 nt, Artificial Sequence
  SARM1 targeting guide sequence portion
acugguggcaaacccaguggg

SEQ ID NO: 10037 - RNA, 21 nt, Artificial Sequence
  SARM1 targeting guide sequence portion
acuucagaaaugcuacacucc

SEQ ID NO: 10038 - RNA, 21 nt, Artificial Sequence
  SARM1 targeting guide sequence portion
agaaaugcuacacuccccgcu

SEQ ID NO: 10039 - RNA, 21 nt, Artificial Sequence
  SARM1 targeting guide sequence portion
agacaucuggaguguccccac

SEQ ID NO: 10040 - RNA, 21 nt, Artificial Sequence
  SARM1 targeting guide sequence portion
agaugucuucaucagcuaccg

SEQ ID NO: 10041 - RNA, 21 nt, Artificial Sequence
  SARM1 targeting guide sequence portion
agcuaccgccggaacucaggu

SEQ ID NO: 10042 - RNA, 21 nt, Artificial Sequence
  SARM1 targeting guide sequence portion
agcugaugaagacaucuggag

SEQ ID NO: 10043 - RNA, 21 nt, Artificial Sequence
  SARM1 targeting guide sequence portion
agcugggaaccugaguuccgg

SEQ ID NO: 10044 - RNA, 21 nt, Artificial Sequence
  SARM1 targeting guide sequence portion
agggcagcggggaguguagca

SEQ ID NO: 10045 - RNA, 21 nt, Artificial Sequence
  SARM1 targeting guide sequence portion
aguacagggcagcggggagug

SEQ ID NO: 10046 - RNA, 21 nt, Artificial Sequence
  SARM1 targeting guide sequence portion
aguggggacacuccagauguc

SEQ ID NO: 10047 - RNA, 21 nt, Artificial Sequence
  SARM1 targeting guide sequence portion
aguguccccacuggguuugcc

SEQ ID NO: 10048 - RNA, 21 nt, Artificial Sequence
  SARM1 targeting guide sequence portion
aguuccggcgguagcugauga

SEQ ID NO: 10049 - RNA, 21 nt, Artificial Sequence
  SARM1 targeting guide sequence portion
aucagcuaccgccggaacuca

SEQ ID NO: 10050 - RNA, 21 nt, Artificial Sequence
  SARM1 targeting guide sequence portion
aucuggaguguccccacuggg

SEQ ID NO: 10051 - RNA, 21 nt, Artificial Sequence
  SARM1 targeting guide sequence portion
augaagacaucuggagugucc

SEQ ID NO: 10052 - RNA, 21 nt, Artificial Sequence
  SARM1 targeting guide sequence portion
augcuacacuccccgcugccc

SEQ ID NO: 10053 - RNA, 21 nt, Artificial Sequence
  SARM1 targeting guide sequence portion
augucuucaucagcuaccgcc

SEQ ID NO: 10054 - RNA, 21 nt, Artificial Sequence
  SARM1 targeting guide sequence portion
caaacccaguggggacacucc

SEQ ID NO: 10055 - RNA, 21 nt, Artificial Sequence
  SARM1 targeting guide sequence portion
caccaguacagggcagcgggg

SEQ ID NO: 10056 - RNA, 21 nt, Artificial Sequence
  SARM1 targeting guide sequence portion
caccuggccagcugggaaccu

SEQ ID NO: 10057 - RNA, 21 nt, Artificial Sequence
  SARM1 targeting guide sequence portion
cacuccagaugucuucaucag

SEQ ID NO: 10058 - RNA, 21 nt, Artificial Sequence
  SARM1 targeting guide sequence portion
cacuccccgcugcccuguacu

SEQ ID NO: 10059 - RNA, 21 nt, Artificial Sequence
  SARM1 targeting guide sequence portion
cacuggguuugccaccaguac

SEQ ID NO: 10060 - RNA, 21 nt, Artificial Sequence
  SARM1 targeting guide sequence portion
cagaaaugcuacacuccccgc

SEQ ID NO: 10061 - RNA, 21 nt, Artificial Sequence
  SARM1 targeting guide sequence portion
cagaugucuucaucagcuacc

SEQ ID NO: 10062 - RNA, 21 nt, Artificial Sequence
  SARM1 targeting guide sequence portion
cagcggggaguguagcauuuc

SEQ ID NO: 10063 - RNA, 21 nt, Artificial Sequence
  SARM1 targeting guide sequence portion
cagcuaccgccggaacucagg

SEQ ID NO: 10064 - RNA, 21 nt, Artificial Sequence
  SARM1 targeting guide sequence portion
cagcugggaaccugaguuccg

SEQ ID NO: 10065 - RNA, 21 nt, Artificial Sequence
  SARM1 targeting guide sequence portion
cagggcagcggggaguguagc

SEQ ID NO: 10066 - RNA, 21 nt, Artificial Sequence
  SARM1 targeting guide sequence portion
caguacagggcagcggggagu

SEQ ID NO: 10067 - RNA, 21 nt, Artificial Sequence
  SARM1 targeting guide sequence portion
caguggggacacuccagaugu

SEQ ID NO: 10068 - RNA, 21 nt, Artificial Sequence
  SARM1 targeting guide sequence portion
caucagcuaccgccggaacuc

SEQ ID NO: 10069 - RNA, 21 nt, Artificial Sequence
  SARM1 targeting guide sequence portion
caucuggaguguccccacugg

SEQ ID NO: 10070 - RNA, 21 nt, Artificial Sequence
  SARM1 targeting guide sequence portion
ccaccaguacagggcagcggg

SEQ ID NO: 10071 - RNA, 21 nt, Artificial Sequence
  SARM1 targeting guide sequence portion
ccacuggguuugccaccagua

SEQ ID NO: 10072 - RNA, 21 nt, Artificial Sequence
  SARM1 targeting guide sequence portion
ccagaugucuucaucagcuac

SEQ ID NO: 10073 - RNA, 21 nt, Artificial Sequence
  SARM1 targeting guide sequence portion
ccagcugggaaccugaguucc

SEQ ID NO: 10074 - RNA, 21 nt, Artificial Sequence
  SARM1 targeting guide sequence portion
ccaguacagggcagcggggag

SEQ ID NO: 10075 - RNA, 21 nt, Artificial Sequence
  SARM1 targeting guide sequence portion
ccaguggggacacuccagaug

SEQ ID NO: 10076 - RNA, 21 nt, Artificial Sequence
  SARM1 targeting guide sequence portion
cccacuggguuugccaccagu

SEQ ID NO: 10077 - RNA, 21 nt, Artificial Sequence
  SARM1 targeting guide sequence portion
cccaguggggacacuccagau

SEQ ID NO: 10078 - RNA, 21 nt, Artificial Sequence
  SARM1 targeting guide sequence portion
ccccacuggguuugccaccag

SEQ ID NO: 10079 - RNA, 21 nt, Artificial Sequence
  SARM1 targeting guide sequence portion
ccccgcugcccuguacuggug

SEQ ID NO: 10080 - RNA, 21 nt, Artificial Sequence
  SARM1 targeting guide sequence portion
cccgcugcccuguacuggugg

SEQ ID NO: 10081 - RNA, 21 nt, Artificial Sequence
  SARM1 targeting guide sequence portion
cccuguacugguggcaaaccc

SEQ ID NO: 10082 - RNA, 21 nt, Artificial Sequence
  SARM1 targeting guide sequence portion
ccgccggaacucagguuccca

SEQ ID NO: 10083 - RNA, 21 nt, Artificial Sequence
  SARM1 targeting guide sequence portion
ccgcugcccuguacugguggc

SEQ ID NO: 10084 - RNA, 21 nt, Artificial Sequence
  SARM1 targeting guide sequence portion
ccggaacucagguucccagcu

SEQ ID NO: 10085 - RNA, 21 nt, Artificial Sequence
  SARM1 targeting guide sequence portion
ccggcgguagcugaugaagac

SEQ ID NO: 10086 - RNA, 21 nt, Artificial Sequence
  SARM1 targeting guide sequence portion
ccucaccuggccagcugggaa

SEQ ID NO: 10087 - RNA, 21 nt, Artificial Sequence
  SARM1 targeting guide sequence portion
ccugaguuccggcgguagcug

SEQ ID NO: 10088 - RNA, 21 nt, Artificial Sequence
  SARM1 targeting guide sequence portion
ccuggccagcugggaaccuga

SEQ ID NO: 10089 - RNA, 21 nt, Artificial Sequence
  SARM1 targeting guide sequence portion
ccuguacugguggcaaaccca

SEQ ID NO: 10090 - RNA, 21 nt, Artificial Sequence
  SARM1 targeting guide sequence portion
cgccggaacucagguucccag

SEQ ID NO: 10091 - RNA, 21 nt, Artificial Sequence
  SARM1 targeting guide sequence portion
cgcugcccuguacugguggca

SEQ ID NO: 10092 - RNA, 21 nt, Artificial Sequence
  SARM1 targeting guide sequence portion
cggaacucagguucccagcug

SEQ ID NO: 10093 - RNA, 21 nt, Artificial Sequence
  SARM1 targeting guide sequence portion
cggcgguagcugaugaagaca

SEQ ID NO: 10094 - RNA, 21 nt, Artificial Sequence
  SARM1 targeting guide sequence portion
cgguagcugaugaagacaucu

SEQ ID NO: 10095 - RNA, 21 nt, Artificial Sequence
  SARM1 targeting guide sequence portion
cuacacuccccgcugcccugu

SEQ ID NO: 10096 - RNA, 21 nt, Artificial Sequence
  SARM1 targeting guide sequence portion
cuaccgccggaacucagguuc

SEQ ID NO: 10097 - RNA, 21 nt, Artificial Sequence
  SARM1 targeting guide sequence portion
cucaccuggccagcugggaac

SEQ ID NO: 10098 - RNA, 21 nt, Artificial Sequence
  SARM1 targeting guide sequence portion
cucagguucccagcuggccag

SEQ ID NO: 10099 - RNA, 21 nt, Artificial Sequence
  SARM1 targeting guide sequence portion
cuccagaugucuucaucagcu

SEQ ID NO: 10100 - RNA, 21 nt, Artificial Sequence
  SARM1 targeting guide sequence portion
cuccccgcugcccuguacugg

SEQ ID NO: 10101 - RNA, 21 nt, Artificial Sequence
  SARM1 targeting guide sequence portion
cugaguuccggcgguagcuga

SEQ ID NO: 10102 - RNA, 21 nt, Artificial Sequence
  SARM1 targeting guide sequence portion
cugaugaagacaucuggagug

SEQ ID NO: 10103 - RNA, 21 nt, Artificial Sequence
  SARM1 targeting guide sequence portion
cugcccuguacugguggcaaa

SEQ ID NO: 10104 - RNA, 21 nt, Artificial Sequence
  SARM1 targeting guide sequence portion
cuggaguguccccacuggguu

SEQ ID NO: 10105 - RNA, 21 nt, Artificial Sequence
  SARM1 targeting guide sequence portion
cuggccagcugggaaccugag

SEQ ID NO: 10106 - RNA, 21 nt, Artificial Sequence
  SARM1 targeting guide sequence portion
cugggaaccugaguuccggcg

SEQ ID NO: 10107 - RNA, 21 nt, Artificial Sequence
  SARM1 targeting guide sequence portion
cuggguuugccaccaguacag

SEQ ID NO: 10108 - RNA, 21 nt, Artificial Sequence
  SARM1 targeting guide sequence portion
cugguggcaaacccagugggg

SEQ ID NO: 10109 - RNA, 21 nt, Artificial Sequence
  SARM1 targeting guide sequence portion
cuguacugguggcaaacccag

SEQ ID NO: 10110 - RNA, 21 nt, Artificial Sequence
  SARM1 targeting guide sequence portion
cuucagaaaugcuacacuccc

SEQ ID NO: 10111 - RNA, 21 nt, Artificial Sequence
  SARM1 targeting guide sequence portion
cuucaucagcuaccgccggaa

SEQ ID NO: 10112 - RNA, 21 nt, Artificial Sequence
  SARM1 targeting guide sequence portion
gaaaugcuacacuccccgcug

SEQ ID NO: 10113 - RNA, 21 nt, Artificial Sequence
  SARM1 targeting guide sequence portion
gaaccugaguuccggcgguag

SEQ ID NO: 10114 - RNA, 21 nt, Artificial Sequence
  SARM1 targeting guide sequence portion
gaacucagguucccagcuggc

SEQ ID NO: 10115 - RNA, 21 nt, Artificial Sequence
  SARM1 targeting guide sequence portion
gaagacaucuggagugucccc

SEQ ID NO: 10116 - RNA, 21 nt, Artificial Sequence
  SARM1 targeting guide sequence portion
gacacuccagaugucuucauc

SEQ ID NO: 10117 - RNA, 21 nt, Artificial Sequence
  SARM1 targeting guide sequence portion
gacaucuggaguguccccacu

SEQ ID NO: 10118 - RNA, 21 nt, Artificial Sequence
  SARM1 targeting guide sequence portion
gaguguccccacuggguuugc

SEQ ID NO: 10119 - RNA, 21 nt, Artificial Sequence
  SARM1 targeting guide sequence portion
gaguuccggcgguagcugaug

SEQ ID NO: 10120 - RNA, 21 nt, Artificial Sequence
  SARM1 targeting guide sequence portion
gaugaagacaucuggaguguc

SEQ ID NO: 10121 - RNA, 21 nt, Artificial Sequence
  SARM1 targeting guide sequence portion
gaugucuucaucagcuaccgc

SEQ ID NO: 10122 - RNA, 21 nt, Artificial Sequence
  SARM1 targeting guide sequence portion
gcaaacccaguggggacacuc

SEQ ID NO: 10123 - RNA, 21 nt, Artificial Sequence
  SARM1 targeting guide sequence portion
gcagcggggaguguagcauuu

SEQ ID NO: 10124 - RNA, 21 nt, Artificial Sequence
  SARM1 targeting guide sequence portion
gccaccaguacagggcagcgg

SEQ ID NO: 10125 - RNA, 21 nt, Artificial Sequence
  SARM1 targeting guide sequence portion
gccagcugggaaccugaguuc

SEQ ID NO: 10126 - RNA, 21 nt, Artificial Sequence
  SARM1 targeting guide sequence portion
gcccuguacugguggcaaacc

SEQ ID NO: 10127 - RNA, 21 nt, Artificial Sequence
  SARM1 targeting guide sequence portion
gccggaacucagguucccagc

SEQ ID NO: 10128 - RNA, 21 nt, Artificial Sequence
  SARM1 targeting guide sequence portion
gcgguagcugaugaagacauc

SEQ ID NO: 10129 - RNA, 21 nt, Artificial Sequence
  SARM1 targeting guide sequence portion
gcuacacuccccgcugcccug

SEQ ID NO: 10130 - RNA, 21 nt, Artificial Sequence
  SARM1 targeting guide sequence portion
gcuaccgccggaacucagguu

SEQ ID NO: 10131 - RNA, 21 nt, Artificial Sequence
  SARM1 targeting guide sequence portion
gcugaugaagacaucuggagu

SEQ ID NO: 10132 - RNA, 21 nt, Artificial Sequence
  SARM1 targeting guide sequence portion
gcugcccuguacugguggcaa

SEQ ID NO: 10133 - RNA, 21 nt, Artificial Sequence
  SARM1 targeting guide sequence portion
gcugggaaccugaguuccggc

SEQ ID NO: 10134 - RNA, 21 nt, Artificial Sequence
  SARM1 targeting guide sequence portion
ggaaccugaguuccggcggua

SEQ ID NO: 10135 - RNA, 21 nt, Artificial Sequence
  SARM1 targeting guide sequence portion
ggaacucagguucccagcugg

SEQ ID NO: 10136 - RNA, 21 nt, Artificial Sequence
  SARM1 targeting guide sequence portion
ggacacuccagaugucuucau

SEQ ID NO: 10137 - RNA, 21 nt, Artificial Sequence
  SARM1 targeting guide sequence portion
ggaguguccccacuggguuug

SEQ ID NO: 10138 - RNA, 21 nt, Artificial Sequence
  SARM1 targeting guide sequence portion
ggcaaacccaguggggacacu

SEQ ID NO: 10139 - RNA, 21 nt, Artificial Sequence
  SARM1 targeting guide sequence portion
ggcagcggggaguguagcauu

SEQ ID NO: 10140 - RNA, 21 nt, Artificial Sequence
  SARM1 targeting guide sequence portion
ggccagcugggaaccugaguu

SEQ ID NO: 10141 - RNA, 21 nt, Artificial Sequence
  SARM1 targeting guide sequence portion
ggcgguagcugaugaagacau

SEQ ID NO: 10142 - RNA, 21 nt, Artificial Sequence
  SARM1 targeting guide sequence portion
gggaaccugaguuccggcggu

SEQ ID NO: 10143 - RNA, 21 nt, Artificial Sequence
  SARM1 targeting guide sequence portion
gggacacuccagaugucuuca

SEQ ID NO: 10144 - RNA, 21 nt, Artificial Sequence
  SARM1 targeting guide sequence portion
gggcagcggggaguguagcau

SEQ ID NO: 10145 - RNA, 21 nt, Artificial Sequence
  SARM1 targeting guide sequence portion
ggggacacuccagaugucuuc

SEQ ID NO: 10146 - RNA, 21 nt, Artificial Sequence
  SARM1 targeting guide sequence portion
ggguuugccaccaguacaggg

SEQ ID NO: 10147 - RNA, 21 nt, Artificial Sequence
  SARM1 targeting guide sequence portion
gguagcugaugaagacaucug

SEQ ID NO: 10148 - RNA, 21 nt, Artificial Sequence
  SARM1 targeting guide sequence portion
gguggcaaacccaguggggac

SEQ ID NO: 10149 - RNA, 21 nt, Artificial Sequence
  SARM1 targeting guide sequence portion
gguuugccaccaguacagggc

SEQ ID NO: 10150 - RNA, 21 nt, Artificial Sequence
  SARM1 targeting guide sequence portion
guacagggcagcggggagugu

SEQ ID NO: 10151 - RNA, 21 nt, Artificial Sequence
  SARM1 targeting guide sequence portion
guacugguggcaaacccagug

SEQ ID NO: 10152 - RNA, 21 nt, Artificial Sequence
  SARM1 targeting guide sequence portion
guagcugaugaagacaucugg

SEQ ID NO: 10153 - RNA, 21 nt, Artificial Sequence
  SARM1 targeting guide sequence portion
guccccacuggguuugccacc

SEQ ID NO: 10154 - RNA, 21 nt, Artificial Sequence
  SARM1 targeting guide sequence portion
gucuucaucagcuaccgccgg

SEQ ID NO: 10155 - RNA, 21 nt, Artificial Sequence
  SARM1 targeting guide sequence portion
guggcaaacccaguggggaca

SEQ ID NO: 10156 - RNA, 21 nt, Artificial Sequence
  SARM1 targeting guide sequence portion
guggggacacuccagaugucu

SEQ ID NO: 10157 - RNA, 21 nt, Artificial Sequence
  SARM1 targeting guide sequence portion
guguccccacuggguuugcca

SEQ ID NO: 10158 - RNA, 21 nt, Artificial Sequence
  SARM1 targeting guide sequence portion
guuccggcgguagcugaugaa

SEQ ID NO: 10159 - RNA, 21 nt, Artificial Sequence
  SARM1 targeting guide sequence portion
guuugccaccaguacagggca

SEQ ID NO: 10160 - RNA, 21 nt, Artificial Sequence
  SARM1 targeting guide sequence portion
uacacuccccgcugcccugua

SEQ ID NO: 10161 - RNA, 21 nt, Artificial Sequence
  SARM1 targeting guide sequence portion
uacagggcagcggggagugua

SEQ ID NO: 10162 - RNA, 21 nt, Artificial Sequence
  SARM1 targeting guide sequence portion
uaccgccggaacucagguucc

SEQ ID NO: 10163 - RNA, 21 nt, Artificial Sequence
  SARM1 targeting guide sequence portion
uacugguggcaaacccagugg

SEQ ID NO: 10164 - RNA, 21 nt, Artificial Sequence
  SARM1 targeting guide sequence portion
uagcugaugaagacaucugga

SEQ ID NO: 10165 - RNA, 21 nt, Artificial Sequence
  SARM1 targeting guide sequence portion
ucaccuggccagcugggaacc

SEQ ID NO: 10166 - RNA, 21 nt, Artificial Sequence
  SARM1 targeting guide sequence portion
ucagaaaugcuacacuccccg

SEQ ID NO: 10167 - RNA, 21 nt, Artificial Sequence
  SARM1 targeting guide sequence portion
ucagcuaccgccggaacucag

SEQ ID NO: 10168 - RNA, 21 nt, Artificial Sequence
  SARM1 targeting guide sequence portion
ucagguucccagcuggccagg

SEQ ID NO: 10169 - RNA, 21 nt, Artificial Sequence
  SARM1 targeting guide sequence portion
ucaucagcuaccgccggaacu

SEQ ID NO: 10170 - RNA, 21 nt, Artificial Sequence
  SARM1 targeting guide sequence portion
uccagaugucuucaucagcua

SEQ ID NO: 10171 - RNA, 21 nt, Artificial Sequence
  SARM1 targeting guide sequence portion
uccccacuggguuugccacca

SEQ ID NO: 10172 - RNA, 21 nt, Artificial Sequence
  SARM1 targeting guide sequence portion
uccccgcugcccuguacuggu

SEQ ID NO: 10173 - RNA, 21 nt, Artificial Sequence
  SARM1 targeting guide sequence portion
uccggcgguagcugaugaaga

SEQ ID NO: 10174 - RNA, 21 nt, Artificial Sequence
  SARM1 targeting guide sequence portion
uccucaccuggccagcuggga

SEQ ID NO: 10175 - RNA, 21 nt, Artificial Sequence
  SARM1 targeting guide sequence portion
ucuggaguguccccacugggu

SEQ ID NO: 10176 - RNA, 21 nt, Artificial Sequence
  SARM1 targeting guide sequence portion
ucuucaucagcuaccgccgga

SEQ ID NO: 10177 - RNA, 21 nt, Artificial Sequence
  SARM1 targeting guide sequence portion
ugaagacaucuggaguguccc

SEQ ID NO: 10178 - RNA, 21 nt, Artificial Sequence
  SARM1 targeting guide sequence portion
ugaguuccggcgguagcugau

SEQ ID NO: 10179 - RNA, 21 nt, Artificial Sequence
  SARM1 targeting guide sequence portion
ugaugaagacaucuggagugu

SEQ ID NO: 10180 - RNA, 21 nt, Artificial Sequence
  SARM1 targeting guide sequence portion
ugccaccaguacagggcagcg

SEQ ID NO: 10181 - RNA, 21 nt, Artificial Sequence
  SARM1 targeting guide sequence portion
ugcccuguacugguggcaaac

SEQ ID NO: 10182 - RNA, 21 nt, Artificial Sequence
  SARM1 targeting guide sequence portion
ugcuacacuccccgcugcccu

SEQ ID NO: 10183 - RNA, 21 nt, Artificial Sequence
  SARM1 targeting guide sequence portion
uggaguguccccacuggguuu

SEQ ID NO: 10184 - RNA, 21 nt, Artificial Sequence
  SARM1 targeting guide sequence portion
uggcaaacccaguggggacac

SEQ ID NO: 10185 - RNA, 21 nt, Artificial Sequence
  SARM1 targeting guide sequence portion
uggccagcugggaaccugagu

SEQ ID NO: 10186 - RNA, 21 nt, Artificial Sequence
  SARM1 targeting guide sequence portion
ugggaaccugaguuccggcgg

SEQ ID NO: 10187 - RNA, 21 nt, Artificial Sequence
  SARM1 targeting guide sequence portion
uggggacacuccagaugucuu

SEQ ID NO: 10188 - RNA, 21 nt, Artificial Sequence
  SARM1 targeting guide sequence portion
uggguuugccaccaguacagg

SEQ ID NO: 10189 - RNA, 21 nt, Artificial Sequence
  SARM1 targeting guide sequence portion
ugguggcaaacccagugggga

SEQ ID NO: 10190 - RNA, 21 nt, Artificial Sequence
  SARM1 targeting guide sequence portion
uguacugguggcaaacccagu

SEQ ID NO: 10191 - RNA, 21 nt, Artificial Sequence
  SARM1 targeting guide sequence portion
uguccccacuggguuugccac

SEQ ID NO: 10192 - RNA, 21 nt, Artificial Sequence
  SARM1 targeting guide sequence portion
ugucuucaucagcuaccgccg

SEQ ID NO: 10193 - RNA, 21 nt, Artificial Sequence
  SARM1 targeting guide sequence portion
uucagaaaugcuacacucccc

SEQ ID NO: 10194 - RNA, 21 nt, Artificial Sequence
  SARM1 targeting guide sequence portion
uucaucagcuaccgccggaac

SEQ ID NO: 10195 - RNA, 21 nt, Artificial Sequence
  SARM1 targeting guide sequence portion
uuccggcgguagcugaugaag

SEQ ID NO: 10196 - RNA, 21 nt, Artificial Sequence
  SARM1 targeting guide sequence portion
uugccaccaguacagggcagc

SEQ ID NO: 10197 - RNA, 21 nt, Artificial Sequence
  SARM1 targeting guide sequence portion
uuugccaccaguacagggcag

SEQ ID NO: 10198 - RNA, 22 nt, Artificial Sequence
  SARM1 targeting guide sequence portion
aaacccaguggggacacuccag

SEQ ID NO: 10199 - RNA, 22 nt, Artificial Sequence
  SARM1 targeting guide sequence portion
aaaugcuacacuccccgcugcc

SEQ ID NO: 10200 - RNA, 22 nt, Artificial Sequence
  SARM1 targeting guide sequence portion
aacccaguggggacacuccaga

SEQ ID NO: 10201 - RNA, 22 nt, Artificial Sequence
  SARM1 targeting guide sequence portion
aaccugaguuccggcgguagcu

SEQ ID NO: 10202 - RNA, 22 nt, Artificial Sequence
  SARM1 targeting guide sequence portion
aacucagguucccagcuggcca

SEQ ID NO: 10203 - RNA, 22 nt, Artificial Sequence
  SARM1 targeting guide sequence portion
aagacaucuggaguguccccac

SEQ ID NO: 10204 - RNA, 22 nt, Artificial Sequence
  SARM1 targeting guide sequence portion
aaugcuacacuccccgcugccc

SEQ ID NO: 10205 - RNA, 22 nt, Artificial Sequence
  SARM1 targeting guide sequence portion
acacuccagaugucuucaucag

SEQ ID NO: 10206 - RNA, 22 nt, Artificial Sequence
  SARM1 targeting guide sequence portion
acacuccccgcugcccuguacu

SEQ ID NO: 10207 - RNA, 22 nt, Artificial Sequence
  SARM1 targeting guide sequence portion
acagggcagcggggaguguagc

SEQ ID NO: 10208 - RNA, 22 nt, Artificial Sequence
  SARM1 targeting guide sequence portion
acaucuggaguguccccacugg

SEQ ID NO: 10209 - RNA, 22 nt, Artificial Sequence
  SARM1 targeting guide sequence portion
accaguacagggcagcggggag

SEQ ID NO: 10210 - RNA, 22 nt, Artificial Sequence
  SARM1 targeting guide sequence portion
acccaguggggacacuccagau

SEQ ID NO: 10211 - RNA, 22 nt, Artificial Sequence
  SARM1 targeting guide sequence portion
accgccggaacucagguuccca

SEQ ID NO: 10212 - RNA, 22 nt, Artificial Sequence
  SARM1 targeting guide sequence portion
accugaguuccggcgguagcug

SEQ ID NO: 10213 - RNA, 22 nt, Artificial Sequence
  SARM1 targeting guide sequence portion
accuggccagcugggaaccuga

SEQ ID NO: 10214 - RNA, 22 nt, Artificial Sequence
  SARM1 targeting guide sequence portion
acucagguucccagcuggccag

SEQ ID NO: 10215 - RNA, 22 nt, Artificial Sequence
  SARM1 targeting guide sequence portion
acuccagaugucuucaucagcu

SEQ ID NO: 10216 - RNA, 22 nt, Artificial Sequence
  SARM1 targeting guide sequence portion
acuccccgcugcccuguacugg

SEQ ID NO: 10217 - RNA, 22 nt, Artificial Sequence
  SARM1 targeting guide sequence portion
acuggguuugccaccaguacag

SEQ ID NO: 10218 - RNA, 22 nt, Artificial Sequence
  SARM1 targeting guide sequence portion
acugguggcaaacccagugggg

SEQ ID NO: 10219 - RNA, 22 nt, Artificial Sequence
  SARM1 targeting guide sequence portion
acuucagaaaugcuacacuccc

SEQ ID NO: 10220 - RNA, 22 nt, Artificial Sequence
  SARM1 targeting guide sequence portion
agaaaugcuacacuccccgcug

SEQ ID NO: 10221 - RNA, 22 nt, Artificial Sequence
  SARM1 targeting guide sequence portion
agacaucuggaguguccccacu

SEQ ID NO: 10222 - RNA, 22 nt, Artificial Sequence
  SARM1 targeting guide sequence portion
agaugucuucaucagcuaccgc

SEQ ID NO: 10223 - RNA, 22 nt, Artificial Sequence
  SARM1 targeting guide sequence portion
agcuaccgccggaacucagguu

SEQ ID NO: 10224 - RNA, 22 nt, Artificial Sequence
  SARM1 targeting guide sequence portion
agcugaugaagacaucuggagu

SEQ ID NO: 10225 - RNA, 22 nt, Artificial Sequence
  SARM1 targeting guide sequence portion
agcugggaaccugaguuccggc

SEQ ID NO: 10226 - RNA, 22 nt, Artificial Sequence
  SARM1 targeting guide sequence portion
agggcagcggggaguguagcau

SEQ ID NO: 10227 - RNA, 22 nt, Artificial Sequence
  SARM1 targeting guide sequence portion
aguacagggcagcggggagugu

SEQ ID NO: 10228 - RNA, 22 nt, Artificial Sequence
  SARM1 targeting guide sequence portion
aguggggacacuccagaugucu

SEQ ID NO: 10229 - RNA, 22 nt, Artificial Sequence
  SARM1 targeting guide sequence portion
aguguccccacuggguuugcca

SEQ ID NO: 10230 - RNA, 22 nt, Artificial Sequence
  SARM1 targeting guide sequence portion
aguuccggcgguagcugaugaa

SEQ ID NO: 10231 - RNA, 22 nt, Artificial Sequence
  SARM1 targeting guide sequence portion
aucagcuaccgccggaacucag

SEQ ID NO: 10232 - RNA, 22 nt, Artificial Sequence
  SARM1 targeting guide sequence portion
aucuggaguguccccacugggu

SEQ ID NO: 10233 - RNA, 22 nt, Artificial Sequence
  SARM1 targeting guide sequence portion
augaagacaucuggaguguccc

SEQ ID NO: 10234 - RNA, 22 nt, Artificial Sequence
  SARM1 targeting guide sequence portion
augcuacacuccccgcugcccu

SEQ ID NO: 10235 - RNA, 22 nt, Artificial Sequence
  SARM1 targeting guide sequence portion
augucuucaucagcuaccgccg

SEQ ID NO: 10236 - RNA, 22 nt, Artificial Sequence
  SARM1 targeting guide sequence portion
caaacccaguggggacacucca

SEQ ID NO: 10237 - RNA, 22 nt, Artificial Sequence
  SARM1 targeting guide sequence portion
caccaguacagggcagcgggga

SEQ ID NO: 10238 - RNA, 22 nt, Artificial Sequence
  SARM1 targeting guide sequence portion
caccuggccagcugggaaccug

SEQ ID NO: 10239 - RNA, 22 nt, Artificial Sequence
  SARM1 targeting guide sequence portion
cacuccagaugucuucaucagc

SEQ ID NO: 10240 - RNA, 22 nt, Artificial Sequence
  SARM1 targeting guide sequence portion
cacuccccgcugcccuguacug

SEQ ID NO: 10241 - RNA, 22 nt, Artificial Sequence
  SARM1 targeting guide sequence portion
cacuggguuugccaccaguaca

SEQ ID NO: 10242 - RNA, 22 nt, Artificial Sequence
  SARM1 targeting guide sequence portion
cagaaaugcuacacuccccgcu

SEQ ID NO: 10243 - RNA, 22 nt, Artificial Sequence
  SARM1 targeting guide sequence portion
cagaugucuucaucagcuaccg

SEQ ID NO: 10244 - RNA, 22 nt, Artificial Sequence
  SARM1 targeting guide sequence portion
cagcuaccgccggaacucaggu

SEQ ID NO: 10245 - RNA, 22 nt, Artificial Sequence
  SARM1 targeting guide sequence portion
cagcugggaaccugaguuccgg

SEQ ID NO: 10246 - RNA, 22 nt, Artificial Sequence
  SARM1 targeting guide sequence portion
cagggcagcggggaguguagca

SEQ ID NO: 10247 - RNA, 22 nt, Artificial Sequence
  SARM1 targeting guide sequence portion
caguacagggcagcggggagug

SEQ ID NO: 10248 - RNA, 22 nt, Artificial Sequence
  SARM1 targeting guide sequence portion
caguggggacacuccagauguc

SEQ ID NO: 10249 - RNA, 22 nt, Artificial Sequence
  SARM1 targeting guide sequence portion
caucagcuaccgccggaacuca

SEQ ID NO: 10250 - RNA, 22 nt, Artificial Sequence
  SARM1 targeting guide sequence portion
caucuggaguguccccacuggg

SEQ ID NO: 10251 - RNA, 22 nt, Artificial Sequence
  SARM1 targeting guide sequence portion
ccaccaguacagggcagcgggg

SEQ ID NO: 10252 - RNA, 22 nt, Artificial Sequence
  SARM1 targeting guide sequence portion
ccacuggguuugccaccaguac

SEQ ID NO: 10253 - RNA, 22 nt, Artificial Sequence
  SARM1 targeting guide sequence portion
ccagaugucuucaucagcuacc

SEQ ID NO: 10254 - RNA, 22 nt, Artificial Sequence
  SARM1 targeting guide sequence portion
ccagcugggaaccugaguuccg

SEQ ID NO: 10255 - RNA, 22 nt, Artificial Sequence
  SARM1 targeting guide sequence portion
ccaguacagggcagcggggagu

SEQ ID NO: 10256 - RNA, 22 nt, Artificial Sequence
  SARM1 targeting guide sequence portion
ccaguggggacacuccagaugu

SEQ ID NO: 10257 - RNA, 22 nt, Artificial Sequence
  SARM1 targeting guide sequence portion
cccacuggguuugccaccagua

SEQ ID NO: 10258 - RNA, 22 nt, Artificial Sequence
  SARM1 targeting guide sequence portion
cccaguggggacacuccagaug

SEQ ID NO: 10259 - RNA, 22 nt, Artificial Sequence
  SARM1 targeting guide sequence portion
ccccacuggguuugccaccagu

SEQ ID NO: 10260 - RNA, 22 nt, Artificial Sequence
  SARM1 targeting guide sequence portion
ccccgcugcccuguacuggugg

SEQ ID NO: 10261 - RNA, 22 nt, Artificial Sequence
  SARM1 targeting guide sequence portion
cccgcugcccuguacugguggc

SEQ ID NO: 10262 - RNA, 22 nt, Artificial Sequence
  SARM1 targeting guide sequence portion
cccuguacugguggcaaaccca

SEQ ID NO: 10263 - RNA, 22 nt, Artificial Sequence
  SARM1 targeting guide sequence portion
ccgccggaacucagguucccag

SEQ ID NO: 10264 - RNA, 22 nt, Artificial Sequence
  SARM1 targeting guide sequence portion
ccgcugcccuguacugguggca

SEQ ID NO: 10265 - RNA, 22 nt, Artificial Sequence
  SARM1 targeting guide sequence portion
ccggaacucagguucccagcug

SEQ ID NO: 10266 - RNA, 22 nt, Artificial Sequence
  SARM1 targeting guide sequence portion
ccggcgguagcugaugaagaca

SEQ ID NO: 10267 - RNA, 22 nt, Artificial Sequence
  SARM1 targeting guide sequence portion
ccucaccuggccagcugggaac

SEQ ID NO: 10268 - RNA, 22 nt, Artificial Sequence
  SARM1 targeting guide sequence portion
ccugaguuccggcgguagcuga

SEQ ID NO: 10269 - RNA, 22 nt, Artificial Sequence
  SARM1 targeting guide sequence portion
ccuggccagcugggaaccugag

SEQ ID NO: 10270 - RNA, 22 nt, Artificial Sequence
  SARM1 targeting guide sequence portion
ccuguacugguggcaaacccag

SEQ ID NO: 10271 - RNA, 22 nt, Artificial Sequence
  SARM1 targeting guide sequence portion
cgccggaacucagguucccagc

SEQ ID NO: 10272 - RNA, 22 nt, Artificial Sequence
  SARM1 targeting guide sequence portion
cgcugcccuguacugguggcaa

SEQ ID NO: 10273 - RNA, 22 nt, Artificial Sequence
  SARM1 targeting guide sequence portion
cggaacucagguucccagcugg

SEQ ID NO: 10274 - RNA, 22 nt, Artificial Sequence
  SARM1 targeting guide sequence portion
cggcgguagcugaugaagacau

SEQ ID NO: 10275 - RNA, 22 nt, Artificial Sequence
  SARM1 targeting guide sequence portion
cgguagcugaugaagacaucug

SEQ ID NO: 10276 - RNA, 22 nt, Artificial Sequence
  SARM1 targeting guide sequence portion
cuacacuccccgcugcccugua

SEQ ID NO: 10277 - RNA, 22 nt, Artificial Sequence
  SARM1 targeting guide sequence portion
cuaccgccggaacucagguucc

SEQ ID NO: 10278 - RNA, 22 nt, Artificial Sequence
  SARM1 targeting guide sequence portion
cucaccuggccagcugggaacc

SEQ ID NO: 10279 - RNA, 22 nt, Artificial Sequence
  SARM1 targeting guide sequence portion
cucagguucccagcuggccagg

SEQ ID NO: 10280 - RNA, 22 nt, Artificial Sequence
  SARM1 targeting guide sequence portion
cuccagaugucuucaucagcua

SEQ ID NO: 10281 - RNA, 22 nt, Artificial Sequence
  SARM1 targeting guide sequence portion
cuccccgcugcccuguacuggu

SEQ ID NO: 10282 - RNA, 22 nt, Artificial Sequence
  SARM1 targeting guide sequence portion
cugaguuccggcgguagcugau

SEQ ID NO: 10283 - RNA, 22 nt, Artificial Sequence
  SARM1 targeting guide sequence portion
cugaugaagacaucuggagugu

SEQ ID NO: 10284 - RNA, 22 nt, Artificial Sequence
  SARM1 targeting guide sequence portion
cugcccuguacugguggcaaac

SEQ ID NO: 10285 - RNA, 22 nt, Artificial Sequence
  SARM1 targeting guide sequence portion
cuggaguguccccacuggguuu

SEQ ID NO: 10286 - RNA, 22 nt, Artificial Sequence
  SARM1 targeting guide sequence portion
cuggccagcugggaaccugagu

SEQ ID NO: 10287 - RNA, 22 nt, Artificial Sequence
  SARM1 targeting guide sequence portion
cugggaaccugaguuccggcgg

SEQ ID NO: 10288 - RNA, 22 nt, Artificial Sequence
  SARM1 targeting guide sequence portion
cuggguuugccaccaguacagg

SEQ ID NO: 10289 - RNA, 22 nt, Artificial Sequence
  SARM1 targeting guide sequence portion
cugguggcaaacccagugggga

SEQ ID NO: 10290 - RNA, 22 nt, Artificial Sequence
  SARM1 targeting guide sequence portion
cuguacugguggcaaacccagu

SEQ ID NO: 10291 - RNA, 22 nt, Artificial Sequence
  SARM1 targeting guide sequence portion
cuucagaaaugcuacacucccc

SEQ ID NO: 10292 - RNA, 22 nt, Artificial Sequence
  SARM1 targeting guide sequence portion
cuucaucagcuaccgccggaac

SEQ ID NO: 10293 - RNA, 22 nt, Artificial Sequence
  SARM1 targeting guide sequence portion
gaaaugcuacacuccccgcugc

SEQ ID NO: 10294 - RNA, 22 nt, Artificial Sequence
  SARM1 targeting guide sequence portion
gaaccugaguuccggcgguagc

SEQ ID NO: 10295 - RNA, 22 nt, Artificial Sequence
  SARM1 targeting guide sequence portion
gaacucagguucccagcuggcc

SEQ ID NO: 10296 - RNA, 22 nt, Artificial Sequence
  SARM1 targeting guide sequence portion
gaagacaucuggagugucccca

SEQ ID NO: 10297 - RNA, 22 nt, Artificial Sequence
  SARM1 targeting guide sequence portion
gacacuccagaugucuucauca

SEQ ID NO: 10298 - RNA, 22 nt, Artificial Sequence
  SARM1 targeting guide sequence portion
gacaucuggaguguccccacug

SEQ ID NO: 10299 - RNA, 22 nt, Artificial Sequence
  SARM1 targeting guide sequence portion
gaguguccccacuggguuugcc

SEQ ID NO: 10300 - RNA, 22 nt, Artificial Sequence
  SARM1 targeting guide sequence portion
gaguuccggcgguagcugauga

SEQ ID NO: 10301 - RNA, 22 nt, Artificial Sequence
  SARM1 targeting guide sequence portion
gaugaagacaucuggagugucc

SEQ ID NO: 10302 - RNA, 22 nt, Artificial Sequence
  SARM1 targeting guide sequence portion
gaugucuucaucagcuaccgcc

SEQ ID NO: 10303 - RNA, 22 nt, Artificial Sequence
  SARM1 targeting guide sequence portion
gcaaacccaguggggacacucc

SEQ ID NO: 10304 - RNA, 22 nt, Artificial Sequence
  SARM1 targeting guide sequence portion
gcagcggggaguguagcauuuc

SEQ ID NO: 10305 - RNA, 22 nt, Artificial Sequence
  SARM1 targeting guide sequence portion
gccaccaguacagggcagcggg

SEQ ID NO: 10306 - RNA, 22 nt, Artificial Sequence
  SARM1 targeting guide sequence portion
gccagcugggaaccugaguucc

SEQ ID NO: 10307 - RNA, 22 nt, Artificial Sequence
  SARM1 targeting guide sequence portion
gcccuguacugguggcaaaccc

SEQ ID NO: 10308 - RNA, 22 nt, Artificial Sequence
  SARM1 targeting guide sequence portion
gccggaacucagguucccagcu

SEQ ID NO: 10309 - RNA, 22 nt, Artificial Sequence
  SARM1 targeting guide sequence portion
gcgguagcugaugaagacaucu

SEQ ID NO: 10310 - RNA, 22 nt, Artificial Sequence
  SARM1 targeting guide sequence portion
gcuacacuccccgcugcccugu

SEQ ID NO: 10311 - RNA, 22 nt, Artificial Sequence
  SARM1 targeting guide sequence portion
gcuaccgccggaacucagguuc

SEQ ID NO: 10312 - RNA, 22 nt, Artificial Sequence
  SARM1 targeting guide sequence portion
gcugaugaagacaucuggagug

SEQ ID NO: 10313 - RNA, 22 nt, Artificial Sequence
  SARM1 targeting guide sequence portion
gcugcccuguacugguggcaaa

SEQ ID NO: 10314 - RNA, 22 nt, Artificial Sequence
  SARM1 targeting guide sequence portion
gcugggaaccugaguuccggcg

SEQ ID NO: 10315 - RNA, 22 nt, Artificial Sequence
  SARM1 targeting guide sequence portion
ggaaccugaguuccggcgguag

SEQ ID NO: 10316 - RNA, 22 nt, Artificial Sequence
  SARM1 targeting guide sequence portion
ggaacucagguucccagcuggc

SEQ ID NO: 10317 - RNA, 22 nt, Artificial Sequence
  SARM1 targeting guide sequence portion
ggacacuccagaugucuucauc

SEQ ID NO: 10318 - RNA, 22 nt, Artificial Sequence
  SARM1 targeting guide sequence portion
ggaguguccccacuggguuugc

SEQ ID NO: 10319 - RNA, 22 nt, Artificial Sequence
  SARM1 targeting guide sequence portion
ggcaaacccaguggggacacuc

SEQ ID NO: 10320 - RNA, 22 nt, Artificial Sequence
  SARM1 targeting guide sequence portion
ggcagcggggaguguagcauuu

SEQ ID NO: 10321 - RNA, 22 nt, Artificial Sequence
  SARM1 targeting guide sequence portion
ggccagcugggaaccugaguuc

SEQ ID NO: 10322 - RNA, 22 nt, Artificial Sequence
  SARM1 targeting guide sequence portion
ggcgguagcugaugaagacauc

SEQ ID NO: 10323 - RNA, 22 nt, Artificial Sequence
  SARM1 targeting guide sequence portion
gggaaccugaguuccggcggua

SEQ ID NO: 10324 - RNA, 22 nt, Artificial Sequence
  SARM1 targeting guide sequence portion
gggacacuccagaugucuucau

SEQ ID NO: 10325 - RNA, 22 nt, Artificial Sequence
  SARM1 targeting guide sequence portion
gggcagcggggaguguagcauu

SEQ ID NO: 10326 - RNA, 22 nt, Artificial Sequence
  SARM1 targeting guide sequence portion
ggggacacuccagaugucuuca

SEQ ID NO: 10327 - RNA, 22 nt, Artificial Sequence
  SARM1 targeting guide sequence portion
ggguuugccaccaguacagggc

SEQ ID NO: 10328 - RNA, 22 nt, Artificial Sequence
  SARM1 targeting guide sequence portion
gguagcugaugaagacaucugg

SEQ ID NO: 10329 - RNA, 22 nt, Artificial Sequence
  SARM1 targeting guide sequence portion
gguggcaaacccaguggggaca

SEQ ID NO: 10330 - RNA, 22 nt, Artificial Sequence
  SARM1 targeting guide sequence portion
gguuugccaccaguacagggca

SEQ ID NO: 10331 - RNA, 22 nt, Artificial Sequence
  SARM1 targeting guide sequence portion
guacagggcagcggggagugua

SEQ ID NO: 10332 - RNA, 22 nt, Artificial Sequence
  SARM1 targeting guide sequence portion
guacugguggcaaacccagugg

SEQ ID NO: 10333 - RNA, 22 nt, Artificial Sequence
  SARM1 targeting guide sequence portion
guagcugaugaagacaucugga

SEQ ID NO: 10334 - RNA, 22 nt, Artificial Sequence
  SARM1 targeting guide sequence portion
guccccacuggguuugccacca

SEQ ID NO: 10335 - RNA, 22 nt, Artificial Sequence
  SARM1 targeting guide sequence portion
gucuucaucagcuaccgccgga

SEQ ID NO: 10336 - RNA, 22 nt, Artificial Sequence
  SARM1 targeting guide sequence portion
guggcaaacccaguggggacac

SEQ ID NO: 10337 - RNA, 22 nt, Artificial Sequence
  SARM1 targeting guide sequence portion
guggggacacuccagaugucuu

SEQ ID NO: 10338 - RNA, 22 nt, Artificial Sequence
  SARM1 targeting guide sequence portion
guguccccacuggguuugccac

SEQ ID NO: 10339 - RNA, 22 nt, Artificial Sequence
  SARM1 targeting guide sequence portion
guuccggcgguagcugaugaag

SEQ ID NO: 10340 - RNA, 22 nt, Artificial Sequence
  SARM1 targeting guide sequence portion
guuugccaccaguacagggcag

SEQ ID NO: 10341 - RNA, 22 nt, Artificial Sequence
  SARM1 targeting guide sequence portion
uacacuccccgcugcccuguac

SEQ ID NO: 10342 - RNA, 22 nt, Artificial Sequence
  SARM1 targeting guide sequence portion
uacagggcagcggggaguguag

SEQ ID NO: 10343 - RNA, 22 nt, Artificial Sequence
  SARM1 targeting guide sequence portion
uaccgccggaacucagguuccc

SEQ ID NO: 10344 - RNA, 22 nt, Artificial Sequence
  SARM1 targeting guide sequence portion
uacugguggcaaacccaguggg

SEQ ID NO: 10345 - RNA, 22 nt, Artificial Sequence
  SARM1 targeting guide sequence portion
uagcugaugaagacaucuggag

SEQ ID NO: 10346 - RNA, 22 nt, Artificial Sequence
  SARM1 targeting guide sequence portion
ucaccuggccagcugggaaccu

SEQ ID NO: 10347 - RNA, 22 nt, Artificial Sequence
  SARM1 targeting guide sequence portion
ucagaaaugcuacacuccccgc

SEQ ID NO: 10348 - RNA, 22 nt, Artificial Sequence
  SARM1 targeting guide sequence portion
ucagcuaccgccggaacucagg

SEQ ID NO: 10349 - RNA, 22 nt, Artificial Sequence
  SARM1 targeting guide sequence portion
ucaucagcuaccgccggaacuc

SEQ ID NO: 10350 - RNA, 22 nt, Artificial Sequence
  SARM1 targeting guide sequence portion
uccagaugucuucaucagcuac

SEQ ID NO: 10351 - RNA, 22 nt, Artificial Sequence
  SARM1 targeting guide sequence portion
uccccacuggguuugccaccag

SEQ ID NO: 10352 - RNA, 22 nt, Artificial Sequence
  SARM1 targeting guide sequence portion
uccccgcugcccuguacuggug

SEQ ID NO: 10353 - RNA, 22 nt, Artificial Sequence
  SARM1 targeting guide sequence portion
uccggcgguagcugaugaagac

SEQ ID NO: 10354 - RNA, 22 nt, Artificial Sequence
  SARM1 targeting guide sequence portion
uccucaccuggccagcugggaa

SEQ ID NO: 10355 - RNA, 22 nt, Artificial Sequence
  SARM1 targeting guide sequence portion
ucuggaguguccccacuggguu

SEQ ID NO: 10356 - RNA, 22 nt, Artificial Sequence
  SARM1 targeting guide sequence portion
ucuucaucagcuaccgccggaa

SEQ ID NO: 10357 - RNA, 22 nt, Artificial Sequence
  SARM1 targeting guide sequence portion
ugaagacaucuggagugucccc

SEQ ID NO: 10358 - RNA, 22 nt, Artificial Sequence
  SARM1 targeting guide sequence portion
ugaguuccggcgguagcugaug

SEQ ID NO: 10359 - RNA, 22 nt, Artificial Sequence
  SARM1 targeting guide sequence portion
ugaugaagacaucuggaguguc

SEQ ID NO: 10360 - RNA, 22 nt, Artificial Sequence
  SARM1 targeting guide sequence portion
ugccaccaguacagggcagcgg

SEQ ID NO: 10361 - RNA, 22 nt, Artificial Sequence
  SARM1 targeting guide sequence portion
ugcccuguacugguggcaaacc

SEQ ID NO: 10362 - RNA, 22 nt, Artificial Sequence
  SARM1 targeting guide sequence portion
ugcuacacuccccgcugcccug

SEQ ID NO: 10363 - RNA, 22 nt, Artificial Sequence
  SARM1 targeting guide sequence portion
uggaguguccccacuggguuug

SEQ ID NO: 10364 - RNA, 22 nt, Artificial Sequence
  SARM1 targeting guide sequence portion
uggcaaacccaguggggacacu

SEQ ID NO: 10365 - RNA, 22 nt, Artificial Sequence
  SARM1 targeting guide sequence portion
uggccagcugggaaccugaguu

SEQ ID NO: 10366 - RNA, 22 nt, Artificial Sequence
  SARM1 targeting guide sequence portion
ugggaaccugaguuccggcggu

SEQ ID NO: 10367 - RNA, 22 nt, Artificial Sequence
  SARM1 targeting guide sequence portion
uggggacacuccagaugucuuc

SEQ ID NO: 10368 - RNA, 22 nt, Artificial Sequence
  SARM1 targeting guide sequence portion
uggguuugccaccaguacaggg

SEQ ID NO: 10369 - RNA, 22 nt, Artificial Sequence
  SARM1 targeting guide sequence portion
ugguggcaaacccaguggggac

SEQ ID NO: 10370 - RNA, 22 nt, Artificial Sequence
  SARM1 targeting guide sequence portion
uguacugguggcaaacccagug

SEQ ID NO: 10371 - RNA, 22 nt, Artificial Sequence
  SARM1 targeting guide sequence portion
uguccccacuggguuugccacc

SEQ ID NO: 10372 - RNA, 22 nt, Artificial Sequence
  SARM1 targeting guide sequence portion
ugucuucaucagcuaccgccgg

SEQ ID NO: 10373 - RNA, 22 nt, Artificial Sequence
  SARM1 targeting guide sequence portion
uucagaaaugcuacacuccccg

SEQ ID NO: 10374 - RNA, 22 nt, Artificial Sequence
  SARM1 targeting guide sequence portion
uucaucagcuaccgccggaacu

SEQ ID NO: 10375 - RNA, 22 nt, Artificial Sequence
  SARM1 targeting guide sequence portion
uuccggcgguagcugaugaaga

SEQ ID NO: 10376 - RNA, 22 nt, Artificial Sequence
  SARM1 targeting guide sequence portion
uugccaccaguacagggcagcg

SEQ ID NO: 10377 - RNA, 22 nt, Artificial Sequence
  SARM1 targeting guide sequence portion
uuugccaccaguacagggcagc

SEQ ID NO: 10378 - RNA, 20 nt, Artificial Sequence
  SARM1 targeting guide sequence portion
aaacucauccagagugucau

SEQ ID NO: 10379 - RNA, 20 nt, Artificial Sequence
  SARM1 targeting guide sequence portion
aaaguugcgggcacccauga

SEQ ID NO: 10380 - RNA, 20 nt, Artificial Sequence
  SARM1 targeting guide sequence portion
aacacaaaguugcgggcacc

SEQ ID NO: 10381 - RNA, 20 nt, Artificial Sequence
  SARM1 targeting guide sequence portion
aacucauccagagugucaug

SEQ ID NO: 10382 - RNA, 20 nt, Artificial Sequence
  SARM1 targeting guide sequence portion
aacuugccugcuuccagcuu

SEQ ID NO: 10383 - RNA, 20 nt, Artificial Sequence
  SARM1 targeting guide sequence portion
aacuuuguguuggugcuauc

SEQ ID NO: 10384 - RNA, 20 nt, Artificial Sequence
  SARM1 targeting guide sequence portion
aagacacugaagccaugcag

SEQ ID NO: 10385 - RNA, 20 nt, Artificial Sequence
  SARM1 targeting guide sequence portion
aagaccaugacugcaaggau

SEQ ID NO: 10386 - RNA, 20 nt, Artificial Sequence
  SARM1 targeting guide sequence portion
aagcaggcaaguucgaggac

SEQ ID NO: 10387 - RNA, 20 nt, Artificial Sequence
  SARM1 targeting guide sequence portion
aagccaugcagcugcaggug

SEQ ID NO: 10388 - RNA, 20 nt, Artificial Sequence
  SARM1 targeting guide sequence portion
aagcuggaagcaggcaaguu

SEQ ID NO: 10389 - RNA, 20 nt, Artificial Sequence
  SARM1 targeting guide sequence portion
aaggugcaccugcagcugca

SEQ ID NO: 10390 - RNA, 20 nt, Artificial Sequence
  SARM1 targeting guide sequence portion
aagugcaugcaagaccauga

SEQ ID NO: 10391 - RNA, 20 nt, Artificial Sequence
  SARM1 targeting guide sequence portion
aaguucgaggacaaacucau

SEQ ID NO: 10392 - RNA, 20 nt, Artificial Sequence
  SARM1 targeting guide sequence portion
aaguugcgggcacccaugac

SEQ ID NO: 10393 - RNA, 20 nt, Artificial Sequence
  SARM1 targeting guide sequence portion
aauccuugcagucauggucu

SEQ ID NO: 10394 - RNA, 20 nt, Artificial Sequence
  SARM1 targeting guide sequence portion
aaugaagacacugaagccau

SEQ ID NO: 10395 - RNA, 20 nt, Artificial Sequence
  SARM1 targeting guide sequence portion
acaaacucauccagaguguc

SEQ ID NO: 10396 - RNA, 20 nt, Artificial Sequence
  SARM1 targeting guide sequence portion
acaaaguugcgggcacccau

SEQ ID NO: 10397 - RNA, 20 nt, Artificial Sequence
  SARM1 targeting guide sequence portion
acaagugcaugcaagaccau

SEQ ID NO: 10398 - RNA, 20 nt, Artificial Sequence
  SARM1 targeting guide sequence portion
acacaaaguugcgggcaccc

SEQ ID NO: 10399 - RNA, 20 nt, Artificial Sequence
  SARM1 targeting guide sequence portion
acacucuggaugaguuuguc

SEQ ID NO: 10400 - RNA, 20 nt, Artificial Sequence
  SARM1 targeting guide sequence portion
acacugaagccaugcagcug

SEQ ID NO: 10401 - RNA, 20 nt, Artificial Sequence
  SARM1 targeting guide sequence portion
acaucaaugaagacacugaa

SEQ ID NO: 10402 - RNA, 20 nt, Artificial Sequence
  SARM1 targeting guide sequence portion
accaacacaaaguugcgggc

SEQ ID NO: 10403 - RNA, 20 nt, Artificial Sequence
  SARM1 targeting guide sequence portion
accaugacugcaaggauugg

SEQ ID NO: 10404 - RNA, 20 nt, Artificial Sequence
  SARM1 targeting guide sequence portion
acccaauccuugcagucaug

SEQ ID NO: 10405 - RNA, 20 nt, Artificial Sequence
  SARM1 targeting guide sequence portion
acccaugacacucuggauga

SEQ ID NO: 10406 - RNA, 20 nt, Artificial Sequence
  SARM1 targeting guide sequence portion
accuaccuuaugcacccaau

SEQ ID NO: 10407 - RNA, 20 nt, Artificial Sequence
  SARM1 targeting guide sequence portion
accugcagcugcauggcuuc

SEQ ID NO: 10408 - RNA, 20 nt, Artificial Sequence
  SARM1 targeting guide sequence portion
accuggagcacuggacaagu

SEQ ID NO: 10409 - RNA, 20 nt, Artificial Sequence
  SARM1 targeting guide sequence portion
accuuaugcacccaauccuu

SEQ ID NO: 10410 - RNA, 20 nt, Artificial Sequence
  SARM1 targeting guide sequence portion
acucauccagagugucaugg

SEQ ID NO: 10411 - RNA, 20 nt, Artificial Sequence
  SARM1 targeting guide sequence portion
acucuggaugaguuuguccu

SEQ ID NO: 10412 - RNA, 20 nt, Artificial Sequence
  SARM1 targeting guide sequence portion
acugaagccaugcagcugca

SEQ ID NO: 10413 - RNA, 20 nt, Artificial Sequence
  SARM1 targeting guide sequence portion
acugcaaggauugggugcau

SEQ ID NO: 10414 - RNA, 20 nt, Artificial Sequence
  SARM1 targeting guide sequence portion
acuggacaagugcaugcaag

SEQ ID NO: 10415 - RNA, 20 nt, Artificial Sequence
  SARM1 targeting guide sequence portion
acuugccugcuuccagcuuc

SEQ ID NO: 10416 - RNA, 20 nt, Artificial Sequence
  SARM1 targeting guide sequence portion
acuuguccagugcuccaggu

SEQ ID NO: 10417 - RNA, 20 nt, Artificial Sequence
  SARM1 targeting guide sequence portion
acuuuguguuggugcuauca

SEQ ID NO: 10418 - RNA, 20 nt, Artificial Sequence
  SARM1 targeting guide sequence portion
agaagcuggaagcaggcaag

SEQ ID NO: 10419 - RNA, 20 nt, Artificial Sequence
  SARM1 targeting guide sequence portion
agacacugaagccaugcagc

SEQ ID NO: 10420 - RNA, 20 nt, Artificial Sequence
  SARM1 targeting guide sequence portion
agaccaugacugcaaggauu

SEQ ID NO: 10421 - RNA, 20 nt, Artificial Sequence
  SARM1 targeting guide sequence portion
agagugucaugggugcccgc

SEQ ID NO: 10422 - RNA, 20 nt, Artificial Sequence
  SARM1 targeting guide sequence portion
agcaccaacacaaaguugcg

SEQ ID NO: 10423 - RNA, 20 nt, Artificial Sequence
  SARM1 targeting guide sequence portion
agcacuggacaagugcaugc

SEQ ID NO: 10424 - RNA, 20 nt, Artificial Sequence
  SARM1 targeting guide sequence portion
agcaggcaaguucgaggaca

SEQ ID NO: 10425 - RNA, 20 nt, Artificial Sequence
  SARM1 targeting guide sequence portion
agccaugcagcugcaggugc

SEQ ID NO: 10426 - RNA, 20 nt, Artificial Sequence
  SARM1 targeting guide sequence portion
agcugcaggugcaccuucag

SEQ ID NO: 10427 - RNA, 20 nt, Artificial Sequence
  SARM1 targeting guide sequence portion
agcugcauggcuucaguguc

SEQ ID NO: 10428 - RNA, 20 nt, Artificial Sequence
  SARM1 targeting guide sequence portion
agcuggaagcaggcaaguuc

SEQ ID NO: 10429 - RNA, 20 nt, Artificial Sequence
  SARM1 targeting guide sequence portion
agcuucuccacaucaaugaa

SEQ ID NO: 10430 - RNA, 20 nt, Artificial Sequence
  SARM1 targeting guide sequence portion
aggacaaacucauccagagu

SEQ ID NO: 10431 - RNA, 20 nt, Artificial Sequence
  SARM1 targeting guide sequence portion
aggcaaguucgaggacaaac

SEQ ID NO: 10432 - RNA, 20 nt, Artificial Sequence
  SARM1 targeting guide sequence portion
aggugauagcaccaacacaa

SEQ ID NO: 10433 - RNA, 20 nt, Artificial Sequence
  SARM1 targeting guide sequence portion
aggugcaccugcagcugcau

SEQ ID NO: 10434 - RNA, 20 nt, Artificial Sequence
  SARM1 targeting guide sequence portion
agucauggucuugcaugcac

SEQ ID NO: 10435 - RNA, 20 nt, Artificial Sequence
  SARM1 targeting guide sequence portion
agucuccugaaggugcaccu

SEQ ID NO: 10436 - RNA, 20 nt, Artificial Sequence
  SARM1 targeting guide sequence portion
agugcaugcaagaccaugac

SEQ ID NO: 10437 - RNA, 20 nt, Artificial Sequence
  SARM1 targeting guide sequence portion
agugcuccaggugauagcac

SEQ ID NO: 10438 - RNA, 20 nt, Artificial Sequence
  SARM1 targeting guide sequence portion
agugucaugggugcccgcaa

SEQ ID NO: 10439 - RNA, 20 nt, Artificial Sequence
  SARM1 targeting guide sequence portion
agugucuucauugaugugga

SEQ ID NO: 10440 - RNA, 20 nt, Artificial Sequence
  SARM1 targeting guide sequence portion
aguucgaggacaaacucauc

SEQ ID NO: 10441 - RNA, 20 nt, Artificial Sequence
  SARM1 targeting guide sequence portion
aguugcgggcacccaugaca

SEQ ID NO: 10442 - RNA, 20 nt, Artificial Sequence
  SARM1 targeting guide sequence portion
aguuuguccucgaacuugcc

SEQ ID NO: 10443 - RNA, 20 nt, Artificial Sequence
  SARM1 targeting guide sequence portion
auagcaccaacacaaaguug

SEQ ID NO: 10444 - RNA, 20 nt, Artificial Sequence
  SARM1 targeting guide sequence portion
aucaaugaagacacugaagc

SEQ ID NO: 10445 - RNA, 20 nt, Artificial Sequence
  SARM1 targeting guide sequence portion
aucaccuggagcacuggaca

SEQ ID NO: 10446 - RNA, 20 nt, Artificial Sequence
  SARM1 targeting guide sequence portion
auccagagugucaugggugc

SEQ ID NO: 10447 - RNA, 20 nt, Artificial Sequence
  SARM1 targeting guide sequence portion
auccuugcagucauggucuu

SEQ ID NO: 10448 - RNA, 20 nt, Artificial Sequence
  SARM1 targeting guide sequence portion
augaagacacugaagccaug

SEQ ID NO: 10449 - RNA, 20 nt, Artificial Sequence
  SARM1 targeting guide sequence portion
augacacucuggaugaguuu

SEQ ID NO: 10450 - RNA, 20 nt, Artificial Sequence
  SARM1 targeting guide sequence portion
augacugcaaggauugggug

SEQ ID NO: 10451 - RNA, 20 nt, Artificial Sequence
  SARM1 targeting guide sequence portion
augaguuuguccucgaacuu

SEQ ID NO: 10452 - RNA, 20 nt, Artificial Sequence
  SARM1 targeting guide sequence portion
augcaagaccaugacugcaa

SEQ ID NO: 10453 - RNA, 20 nt, Artificial Sequence
  SARM1 targeting guide sequence portion
augcacccaauccuugcagu

SEQ ID NO: 10454 - RNA, 20 nt, Artificial Sequence
  SARM1 targeting guide sequence portion
augcacuuguccagugcucc

SEQ ID NO: 10455 - RNA, 20 nt, Artificial Sequence
  SARM1 targeting guide sequence portion
augcagcugcaggugcaccu

SEQ ID NO: 10456 - RNA, 20 nt, Artificial Sequence
  SARM1 targeting guide sequence portion
auggcuucagugucuucauu

SEQ ID NO: 10457 - RNA, 20 nt, Artificial Sequence
  SARM1 targeting guide sequence portion
augggugcccgcaacuuugu

SEQ ID NO: 10458 - RNA, 20 nt, Artificial Sequence
  SARM1 targeting guide sequence portion
auggucuugcaugcacuugu

SEQ ID NO: 10459 - RNA, 20 nt, Artificial Sequence
  SARM1 targeting guide sequence portion
auguggagaagcuggaagca

SEQ ID NO: 10460 - RNA, 20 nt, Artificial Sequence
  SARM1 targeting guide sequence portion
auugauguggagaagcugga

SEQ ID NO: 10461 - RNA, 20 nt, Artificial Sequence
  SARM1 targeting guide sequence portion
caaacucauccagaguguca

SEQ ID NO: 10462 - RNA, 20 nt, Artificial Sequence
  SARM1 targeting guide sequence portion
caaaguugcgggcacccaug

SEQ ID NO: 10463 - RNA, 20 nt, Artificial Sequence
  SARM1 targeting guide sequence portion
caacacaaaguugcgggcac

SEQ ID NO: 10464 - RNA, 20 nt, Artificial Sequence
  SARM1 targeting guide sequence portion
caacuuuguguuggugcuau

SEQ ID NO: 10465 - RNA, 20 nt, Artificial Sequence
  SARM1 targeting guide sequence portion
caagaccaugacugcaagga

SEQ ID NO: 10466 - RNA, 20 nt, Artificial Sequence
  SARM1 targeting guide sequence portion
caaggauugggugcauaagg

SEQ ID NO: 10467 - RNA, 20 nt, Artificial Sequence
  SARM1 targeting guide sequence portion
caagugcaugcaagaccaug

SEQ ID NO: 10468 - RNA, 20 nt, Artificial Sequence
  SARM1 targeting guide sequence portion
caaguucgaggacaaacuca

SEQ ID NO: 10469 - RNA, 20 nt, Artificial Sequence
  SARM1 targeting guide sequence portion
caauccuugcagucaugguc

SEQ ID NO: 10470 - RNA, 20 nt, Artificial Sequence
  SARM1 targeting guide sequence portion
caaugaagacacugaagcca

SEQ ID NO: 10471 - RNA, 20 nt, Artificial Sequence
  SARM1 targeting guide sequence portion
cacaaaguugcgggcaccca

SEQ ID NO: 10472 - RNA, 20 nt, Artificial Sequence
  SARM1 targeting guide sequence portion
cacaucaaugaagacacuga

SEQ ID NO: 10473 - RNA, 20 nt, Artificial Sequence
  SARM1 targeting guide sequence portion
caccaacacaaaguugcggg

SEQ ID NO: 10474 - RNA, 20 nt, Artificial Sequence
  SARM1 targeting guide sequence portion
cacccaauccuugcagucau

SEQ ID NO: 10475 - RNA, 20 nt, Artificial Sequence
  SARM1 targeting guide sequence portion
cacccaugacacucuggaug

SEQ ID NO: 10476 - RNA, 20 nt, Artificial Sequence
  SARM1 targeting guide sequence portion
caccuaccuuaugcacccaa

SEQ ID NO: 10477 - RNA, 20 nt, Artificial Sequence
  SARM1 targeting guide sequence portion
caccugcagcugcauggcuu

SEQ ID NO: 10478 - RNA, 20 nt, Artificial Sequence
  SARM1 targeting guide sequence portion
caccuggagcacuggacaag

SEQ ID NO: 10479 - RNA, 20 nt, Artificial Sequence
  SARM1 targeting guide sequence portion
cacucuggaugaguuugucc

SEQ ID NO: 10480 - RNA, 20 nt, Artificial Sequence
  SARM1 targeting guide sequence portion
cacugaagccaugcagcugc

SEQ ID NO: 10481 - RNA, 20 nt, Artificial Sequence
  SARM1 targeting guide sequence portion
cacuggacaagugcaugcaa

SEQ ID NO: 10482 - RNA, 20 nt, Artificial Sequence
  SARM1 targeting guide sequence portion
cacuuguccagugcuccagg

SEQ ID NO: 10483 - RNA, 20 nt, Artificial Sequence
  SARM1 targeting guide sequence portion
cagagugucaugggugcccg

SEQ ID NO: 10484 - RNA, 20 nt, Artificial Sequence
  SARM1 targeting guide sequence portion
cagcugcaggugcaccuuca

SEQ ID NO: 10485 - RNA, 20 nt, Artificial Sequence
  SARM1 targeting guide sequence portion
cagcugcauggcuucagugu

SEQ ID NO: 10486 - RNA, 20 nt, Artificial Sequence
  SARM1 targeting guide sequence portion
cagcuucuccacaucaauga

SEQ ID NO: 10487 - RNA, 20 nt, Artificial Sequence
  SARM1 targeting guide sequence portion
caggcaaguucgaggacaaa

SEQ ID NO: 10488 - RNA, 20 nt, Artificial Sequence
  SARM1 targeting guide sequence portion
caggugauagcaccaacaca

SEQ ID NO: 10489 - RNA, 20 nt, Artificial Sequence
  SARM1 targeting guide sequence portion
caggugcaccuucaggagac

SEQ ID NO: 10490 - RNA, 20 nt, Artificial Sequence
  SARM1 targeting guide sequence portion
cagucauggucuugcaugca

SEQ ID NO: 10491 - RNA, 20 nt, Artificial Sequence
  SARM1 targeting guide sequence portion
cagucuccugaaggugcacc

SEQ ID NO: 10492 - RNA, 20 nt, Artificial Sequence
  SARM1 targeting guide sequence portion
cagugcuccaggugauagca

SEQ ID NO: 10493 - RNA, 20 nt, Artificial Sequence
  SARM1 targeting guide sequence portion
cagugucuucauugaugugg

SEQ ID NO: 10494 - RNA, 20 nt, Artificial Sequence
  SARM1 targeting guide sequence portion
caucaaugaagacacugaag

SEQ ID NO: 10495 - RNA, 20 nt, Artificial Sequence
  SARM1 targeting guide sequence portion
cauccagagugucaugggug

SEQ ID NO: 10496 - RNA, 20 nt, Artificial Sequence
  SARM1 targeting guide sequence portion
caugacacucuggaugaguu

SEQ ID NO: 10497 - RNA, 20 nt, Artificial Sequence
  SARM1 targeting guide sequence portion
caugacugcaaggauugggu

SEQ ID NO: 10498 - RNA, 20 nt, Artificial Sequence
  SARM1 targeting guide sequence portion
caugcaagaccaugacugca

SEQ ID NO: 10499 - RNA, 20 nt, Artificial Sequence
  SARM1 targeting guide sequence portion
caugcacuuguccagugcuc

SEQ ID NO: 10500 - RNA, 20 nt, Artificial Sequence
  SARM1 targeting guide sequence portion
caugcagcugcaggugcacc

SEQ ID NO: 10501 - RNA, 20 nt, Artificial Sequence
  SARM1 targeting guide sequence portion
cauggcuucagugucuucau

SEQ ID NO: 10502 - RNA, 20 nt, Artificial Sequence
  SARM1 targeting guide sequence portion
caugggugcccgcaacuuug

SEQ ID NO: 10503 - RNA, 20 nt, Artificial Sequence
  SARM1 targeting guide sequence portion
cauggucuugcaugcacuug

SEQ ID NO: 10504 - RNA, 20 nt, Artificial Sequence
  SARM1 targeting guide sequence portion
cauugauguggagaagcugg

SEQ ID NO: 10505 - RNA, 20 nt, Artificial Sequence
  SARM1 targeting guide sequence portion
ccaacacaaaguugcgggca

SEQ ID NO: 10506 - RNA, 20 nt, Artificial Sequence
  SARM1 targeting guide sequence portion
ccaauccuugcagucauggu

SEQ ID NO: 10507 - RNA, 20 nt, Artificial Sequence
  SARM1 targeting guide sequence portion
ccacaucaaugaagacacug

SEQ ID NO: 10508 - RNA, 20 nt, Artificial Sequence
  SARM1 targeting guide sequence portion
ccagagugucaugggugccc

SEQ ID NO: 10509 - RNA, 20 nt, Artificial Sequence
  SARM1 targeting guide sequence portion
ccagcuucuccacaucaaug

SEQ ID NO: 10510 - RNA, 20 nt, Artificial Sequence
  SARM1 targeting guide sequence portion
ccaggugauagcaccaacac

SEQ ID NO: 10511 - RNA, 20 nt, Artificial Sequence
  SARM1 targeting guide sequence portion
ccagugcuccaggugauagc

SEQ ID NO: 10512 - RNA, 20 nt, Artificial Sequence
  SARM1 targeting guide sequence portion
ccaugacacucuggaugagu

SEQ ID NO: 10513 - RNA, 20 nt, Artificial Sequence
  SARM1 targeting guide sequence portion
ccaugacugcaaggauuggg

SEQ ID NO: 10514 - RNA, 20 nt, Artificial Sequence
  SARM1 targeting guide sequence portion
ccaugcagcugcaggugcac

SEQ ID NO: 10515 - RNA, 20 nt, Artificial Sequence
  SARM1 targeting guide sequence portion
cccaauccuugcagucaugg

SEQ ID NO: 10516 - RNA, 20 nt, Artificial Sequence
  SARM1 targeting guide sequence portion
cccaugacacucuggaugag

SEQ ID NO: 10517 - RNA, 20 nt, Artificial Sequence
  SARM1 targeting guide sequence portion
cccgcaacuuuguguuggug

SEQ ID NO: 10518 - RNA, 20 nt, Artificial Sequence
  SARM1 targeting guide sequence portion
ccgcaacuuuguguuggugc

SEQ ID NO: 10519 - RNA, 20 nt, Artificial Sequence
  SARM1 targeting guide sequence portion
ccuaccuuaugcacccaauc

SEQ ID NO: 10520 - RNA, 20 nt, Artificial Sequence
  SARM1 targeting guide sequence portion
ccucgaacuugccugcuucc

SEQ ID NO: 10521 - RNA, 20 nt, Artificial Sequence
  SARM1 targeting guide sequence portion
ccugaaggugcaccugcagc

SEQ ID NO: 10522 - RNA, 20 nt, Artificial Sequence
  SARM1 targeting guide sequence portion
ccugcagcugcauggcuuca

SEQ ID NO: 10523 - RNA, 20 nt, Artificial Sequence
  SARM1 targeting guide sequence portion
ccugcuuccagcuucuccac

SEQ ID NO: 10524 - RNA, 20 nt, Artificial Sequence
  SARM1 targeting guide sequence portion
ccuggagcacuggacaagug

SEQ ID NO: 10525 - RNA, 20 nt, Artificial Sequence
  SARM1 targeting guide sequence portion
ccuuaugcacccaauccuug

SEQ ID NO: 10526 - RNA, 20 nt, Artificial Sequence
  SARM1 targeting guide sequence portion
ccuugcagucauggucuugc

SEQ ID NO: 10527 - RNA, 20 nt, Artificial Sequence
  SARM1 targeting guide sequence portion
cgaacuugccugcuuccagc

SEQ ID NO: 10528 - RNA, 20 nt, Artificial Sequence
  SARM1 targeting guide sequence portion
cgaggacaaacucauccaga

SEQ ID NO: 10529 - RNA, 20 nt, Artificial Sequence
  SARM1 targeting guide sequence portion
cgcaacuuuguguuggugcu

SEQ ID NO: 10530 - RNA, 20 nt, Artificial Sequence
  SARM1 targeting guide sequence portion
cgggcacccaugacacucug

SEQ ID NO: 10531 - RNA, 20 nt, Artificial Sequence
  SARM1 targeting guide sequence portion
cuaccuuaugcacccaaucc

SEQ ID NO: 10532 - RNA, 20 nt, Artificial Sequence
  SARM1 targeting guide sequence portion
cuaucaccuggagcacugga

SEQ ID NO: 10533 - RNA, 20 nt, Artificial Sequence
  SARM1 targeting guide sequence portion
cucauccagagugucauggg

SEQ ID NO: 10534 - RNA, 20 nt, Artificial Sequence
  SARM1 targeting guide sequence portion
cuccacaucaaugaagacac

SEQ ID NO: 10535 - RNA, 20 nt, Artificial Sequence
  SARM1 targeting guide sequence portion
cuccaggugauagcaccaac

SEQ ID NO: 10536 - RNA, 20 nt, Artificial Sequence
  SARM1 targeting guide sequence portion
cuccugaaggugcaccugca

SEQ ID NO: 10537 - RNA, 20 nt, Artificial Sequence
  SARM1 targeting guide sequence portion
cucgaacuugccugcuucca

SEQ ID NO: 10538 - RNA, 20 nt, Artificial Sequence
  SARM1 targeting guide sequence portion
cucuggaugaguuuguccuc

SEQ ID NO: 10539 - RNA, 20 nt, Artificial Sequence
  SARM1 targeting guide sequence portion
cugaagccaugcagcugcag

SEQ ID NO: 10540 - RNA, 20 nt, Artificial Sequence
  SARM1 targeting guide sequence portion
cugaaggugcaccugcagcu

SEQ ID NO: 10541 - RNA, 20 nt, Artificial Sequence
  SARM1 targeting guide sequence portion
cugcaaggauugggugcaua

SEQ ID NO: 10542 - RNA, 20 nt, Artificial Sequence
  SARM1 targeting guide sequence portion
cugcagcugcauggcuucag

SEQ ID NO: 10543 - RNA, 20 nt, Artificial Sequence
  SARM1 targeting guide sequence portion
cugcaggugcaccuucagga

SEQ ID NO: 10544 - RNA, 20 nt, Artificial Sequence
  SARM1 targeting guide sequence portion
cugcauggcuucagugucuu

SEQ ID NO: 10545 - RNA, 20 nt, Artificial Sequence
  SARM1 targeting guide sequence portion
cugcuuccagcuucuccaca

SEQ ID NO: 10546 - RNA, 20 nt, Artificial Sequence
  SARM1 targeting guide sequence portion
cuggaagcaggcaaguucga

SEQ ID NO: 10547 - RNA, 20 nt, Artificial Sequence
  SARM1 targeting guide sequence portion
cuggacaagugcaugcaaga

SEQ ID NO: 10548 - RNA, 20 nt, Artificial Sequence
  SARM1 targeting guide sequence portion
cuggagcacuggacaagugc

SEQ ID NO: 10549 - RNA, 20 nt, Artificial Sequence
  SARM1 targeting guide sequence portion
cuggaugaguuuguccucga

SEQ ID NO: 10550 - RNA, 20 nt, Artificial Sequence
  SARM1 targeting guide sequence portion
cuuaugcacccaauccuugc

SEQ ID NO: 10551 - RNA, 20 nt, Artificial Sequence
  SARM1 targeting guide sequence portion
cuucagugucuucauugaug

SEQ ID NO: 10552 - RNA, 20 nt, Artificial Sequence
  SARM1 targeting guide sequence portion
cuucauugauguggagaagc

SEQ ID NO: 10553 - RNA, 20 nt, Artificial Sequence
  SARM1 targeting guide sequence portion
cuuccagcuucuccacauca

SEQ ID NO: 10554 - RNA, 20 nt, Artificial Sequence
  SARM1 targeting guide sequence portion
cuucuccacaucaaugaaga

SEQ ID NO: 10555 - RNA, 20 nt, Artificial Sequence
  SARM1 targeting guide sequence portion
cuugcagucauggucuugca

SEQ ID NO: 10556 - RNA, 20 nt, Artificial Sequence
  SARM1 targeting guide sequence portion
cuugcagucuccugaaggug

SEQ ID NO: 10557 - RNA, 20 nt, Artificial Sequence
  SARM1 targeting guide sequence portion
cuugcaugcacuuguccagu

SEQ ID NO: 10558 - RNA, 20 nt, Artificial Sequence
  SARM1 targeting guide sequence portion
cuugccugcuuccagcuucu

SEQ ID NO: 10559 - RNA, 20 nt, Artificial Sequence
  SARM1 targeting guide sequence portion
cuuguccagugcuccaggug

SEQ ID NO: 10560 - RNA, 20 nt, Artificial Sequence
  SARM1 targeting guide sequence portion
cuuuguguuggugcuaucac

SEQ ID NO: 10561 - RNA, 20 nt, Artificial Sequence
  SARM1 targeting guide sequence portion
gaacuugccugcuuccagcu

SEQ ID NO: 10562 - RNA, 20 nt, Artificial Sequence
  SARM1 targeting guide sequence portion
gaagacacugaagccaugca

SEQ ID NO: 10563 - RNA, 20 nt, Artificial Sequence
  SARM1 targeting guide sequence portion
gaagcaggcaaguucgagga

SEQ ID NO: 10564 - RNA, 20 nt, Artificial Sequence
  SARM1 targeting guide sequence portion
gaagccaugcagcugcaggu

SEQ ID NO: 10565 - RNA, 20 nt, Artificial Sequence
  SARM1 targeting guide sequence portion
gaagcuggaagcaggcaagu

SEQ ID NO: 10566 - RNA, 20 nt, Artificial Sequence
  SARM1 targeting guide sequence portion
gaaggugcaccugcagcugc

SEQ ID NO: 10567 - RNA, 20 nt, Artificial Sequence
  SARM1 targeting guide sequence portion
gacaaacucauccagagugu

SEQ ID NO: 10568 - RNA, 20 nt, Artificial Sequence
  SARM1 targeting guide sequence portion
gacaagugcaugcaagacca

SEQ ID NO: 10569 - RNA, 20 nt, Artificial Sequence
  SARM1 targeting guide sequence portion
gacacucuggaugaguuugu

SEQ ID NO: 10570 - RNA, 20 nt, Artificial Sequence
  SARM1 targeting guide sequence portion
gacacugaagccaugcagcu

SEQ ID NO: 10571 - RNA, 20 nt, Artificial Sequence
  SARM1 targeting guide sequence portion
gaccaugacugcaaggauug

SEQ ID NO: 10572 - RNA, 20 nt, Artificial Sequence
  SARM1 targeting guide sequence portion
gacugcaaggauugggugca

SEQ ID NO: 10573 - RNA, 20 nt, Artificial Sequence
  SARM1 targeting guide sequence portion
gagaagcuggaagcaggcaa

SEQ ID NO: 10574 - RNA, 20 nt, Artificial Sequence
  SARM1 targeting guide sequence portion
gagcacuggacaagugcaug

SEQ ID NO: 10575 - RNA, 20 nt, Artificial Sequence
  SARM1 targeting guide sequence portion
gaggacaaacucauccagag

SEQ ID NO: 10576 - RNA, 20 nt, Artificial Sequence
  SARM1 targeting guide sequence portion
gagugucaugggugcccgca

SEQ ID NO: 10577 - RNA, 20 nt, Artificial Sequence
  SARM1 targeting guide sequence portion
gaguuuguccucgaacuugc

SEQ ID NO: 10578 - RNA, 20 nt, Artificial Sequence
  SARM1 targeting guide sequence portion
gauagcaccaacacaaaguu

SEQ ID NO: 10579 - RNA, 20 nt, Artificial Sequence
  SARM1 targeting guide sequence portion
gaugaguuuguccucgaacu

SEQ ID NO: 10580 - RNA, 20 nt, Artificial Sequence
  SARM1 targeting guide sequence portion
gauguggagaagcuggaagc

SEQ ID NO: 10581 - RNA, 20 nt, Artificial Sequence
  SARM1 targeting guide sequence portion
gcaacuuuguguuggugcua

SEQ ID NO: 10582 - RNA, 20 nt, Artificial Sequence
  SARM1 targeting guide sequence portion
gcaagaccaugacugcaagg

SEQ ID NO: 10583 - RNA, 20 nt, Artificial Sequence
  SARM1 targeting guide sequence portion
gcaaggauugggugcauaag

SEQ ID NO: 10584 - RNA, 20 nt, Artificial Sequence
  SARM1 targeting guide sequence portion
gcaaguucgaggacaaacuc

SEQ ID NO: 10585 - RNA, 20 nt, Artificial Sequence
  SARM1 targeting guide sequence portion
gcaccaacacaaaguugcgg

SEQ ID NO: 10586 - RNA, 20 nt, Artificial Sequence
  SARM1 targeting guide sequence portion
gcacccaauccuugcaguca

SEQ ID NO: 10587 - RNA, 20 nt, Artificial Sequence
  SARM1 targeting guide sequence portion
gcacccaugacacucuggau

SEQ ID NO: 10588 - RNA, 20 nt, Artificial Sequence
  SARM1 targeting guide sequence portion
gcaccugcagcugcauggcu

SEQ ID NO: 10589 - RNA, 20 nt, Artificial Sequence
  SARM1 targeting guide sequence portion
gcacuggacaagugcaugca

SEQ ID NO: 10590 - RNA, 20 nt, Artificial Sequence
  SARM1 targeting guide sequence portion
gcacuuguccagugcuccag

SEQ ID NO: 10591 - RNA, 20 nt, Artificial Sequence
  SARM1 targeting guide sequence portion
gcagcugcaggugcaccuuc

SEQ ID NO: 10592 - RNA, 20 nt, Artificial Sequence
  SARM1 targeting guide sequence portion
gcagcugcauggcuucagug

SEQ ID NO: 10593 - RNA, 20 nt, Artificial Sequence
  SARM1 targeting guide sequence portion
gcaggcaaguucgaggacaa

SEQ ID NO: 10594 - RNA, 20 nt, Artificial Sequence
  SARM1 targeting guide sequence portion
gcaggugcaccuucaggaga

SEQ ID NO: 10595 - RNA, 20 nt, Artificial Sequence
  SARM1 targeting guide sequence portion
gcagucauggucuugcaugc

SEQ ID NO: 10596 - RNA, 20 nt, Artificial Sequence
  SARM1 targeting guide sequence portion
gcagucuccugaaggugcac

SEQ ID NO: 10597 - RNA, 20 nt, Artificial Sequence
  SARM1 targeting guide sequence portion
gcaugcaagaccaugacugc

SEQ ID NO: 10598 - RNA, 20 nt, Artificial Sequence
  SARM1 targeting guide sequence portion
gcaugcacuuguccagugcu

SEQ ID NO: 10599 - RNA, 20 nt, Artificial Sequence
  SARM1 targeting guide sequence portion
gcauggcuucagugucuuca

SEQ ID NO: 10600 - RNA, 20 nt, Artificial Sequence
  SARM1 targeting guide sequence portion
gccaugcagcugcaggugca

SEQ ID NO: 10601 - RNA, 20 nt, Artificial Sequence
  SARM1 targeting guide sequence portion
gcccgcaacuuuguguuggu

SEQ ID NO: 10602 - RNA, 20 nt, Artificial Sequence
  SARM1 targeting guide sequence portion
gccugcuuccagcuucucca

SEQ ID NO: 10603 - RNA, 20 nt, Artificial Sequence
  SARM1 targeting guide sequence portion
gcgggcacccaugacacucu

SEQ ID NO: 10604 - RNA, 20 nt, Artificial Sequence
  SARM1 targeting guide sequence portion
gcuaucaccuggagcacugg

SEQ ID NO: 10605 - RNA, 20 nt, Artificial Sequence
  SARM1 targeting guide sequence portion
gcuccaggugauagcaccaa

SEQ ID NO: 10606 - RNA, 20 nt, Artificial Sequence
  SARM1 targeting guide sequence portion
gcugcaggugcaccuucagg

SEQ ID NO: 10607 - RNA, 20 nt, Artificial Sequence
  SARM1 targeting guide sequence portion
gcugcauggcuucagugucu

SEQ ID NO: 10608 - RNA, 20 nt, Artificial Sequence
  SARM1 targeting guide sequence portion
gcuggaagcaggcaaguucg

SEQ ID NO: 10609 - RNA, 20 nt, Artificial Sequence
  SARM1 targeting guide sequence portion
gcuucagugucuucauugau

SEQ ID NO: 10610 - RNA, 20 nt, Artificial Sequence
  SARM1 targeting guide sequence portion
gcuuccagcuucuccacauc

SEQ ID NO: 10611 - RNA, 20 nt, Artificial Sequence
  SARM1 targeting guide sequence portion
gcuucuccacaucaaugaag

SEQ ID NO: 10612 - RNA, 20 nt, Artificial Sequence
  SARM1 targeting guide sequence portion
ggaagcaggcaaguucgagg

SEQ ID NO: 10613 - RNA, 20 nt, Artificial Sequence
  SARM1 targeting guide sequence portion
ggacaaacucauccagagug

SEQ ID NO: 10614 - RNA, 20 nt, Artificial Sequence
  SARM1 targeting guide sequence portion
ggacaagugcaugcaagacc

SEQ ID NO: 10615 - RNA, 20 nt, Artificial Sequence
  SARM1 targeting guide sequence portion
ggagaagcuggaagcaggca

SEQ ID NO: 10616 - RNA, 20 nt, Artificial Sequence
  SARM1 targeting guide sequence portion
ggagcacuggacaagugcau

SEQ ID NO: 10617 - RNA, 20 nt, Artificial Sequence
  SARM1 targeting guide sequence portion
ggaugaguuuguccucgaac

SEQ ID NO: 10618 - RNA, 20 nt, Artificial Sequence
  SARM1 targeting guide sequence portion
ggcaaguucgaggacaaacu

SEQ ID NO: 10619 - RNA, 20 nt, Artificial Sequence
  SARM1 targeting guide sequence portion
ggcacccaugacacucugga

SEQ ID NO: 10620 - RNA, 20 nt, Artificial Sequence
  SARM1 targeting guide sequence portion
ggcuucagugucuucauuga

SEQ ID NO: 10621 - RNA, 20 nt, Artificial Sequence
  SARM1 targeting guide sequence portion
gggcacccaugacacucugg

SEQ ID NO: 10622 - RNA, 20 nt, Artificial Sequence
  SARM1 targeting guide sequence portion
gggugcccgcaacuuugugu

SEQ ID NO: 10623 - RNA, 20 nt, Artificial Sequence
  SARM1 targeting guide sequence portion
ggucuugcaugcacuugucc

SEQ ID NO: 10624 - RNA, 20 nt, Artificial Sequence
  SARM1 targeting guide sequence portion
ggugauagcaccaacacaaa

SEQ ID NO: 10625 - RNA, 20 nt, Artificial Sequence
  SARM1 targeting guide sequence portion
ggugcaccugcagcugcaug

SEQ ID NO: 10626 - RNA, 20 nt, Artificial Sequence
  SARM1 targeting guide sequence portion
ggugcccgcaacuuuguguu

SEQ ID NO: 10627 - RNA, 20 nt, Artificial Sequence
  SARM1 targeting guide sequence portion
ggugcuaucaccuggagcac

SEQ ID NO: 10628 - RNA, 20 nt, Artificial Sequence
  SARM1 targeting guide sequence portion
gucaugggugcccgcaacuu

SEQ ID NO: 10629 - RNA, 20 nt, Artificial Sequence
  SARM1 targeting guide sequence portion
gucauggucuugcaugcacu

SEQ ID NO: 10630 - RNA, 20 nt, Artificial Sequence
  SARM1 targeting guide sequence portion
guccagugcuccaggugaua

SEQ ID NO: 10631 - RNA, 20 nt, Artificial Sequence
  SARM1 targeting guide sequence portion
guccucgaacuugccugcuu

SEQ ID NO: 10632 - RNA, 20 nt, Artificial Sequence
  SARM1 targeting guide sequence portion
gucuccugaaggugcaccug

SEQ ID NO: 10633 - RNA, 20 nt, Artificial Sequence
  SARM1 targeting guide sequence portion
gucuucauugauguggagaa

SEQ ID NO: 10634 - RNA, 20 nt, Artificial Sequence
  SARM1 targeting guide sequence portion
gucuugcaugcacuugucca

SEQ ID NO: 10635 - RNA, 20 nt, Artificial Sequence
  SARM1 targeting guide sequence portion
gugauagcaccaacacaaag

SEQ ID NO: 10636 - RNA, 20 nt, Artificial Sequence
  SARM1 targeting guide sequence portion
gugcaccugcagcugcaugg

SEQ ID NO: 10637 - RNA, 20 nt, Artificial Sequence
  SARM1 targeting guide sequence portion
gugcaugcaagaccaugacu

SEQ ID NO: 10638 - RNA, 20 nt, Artificial Sequence
  SARM1 targeting guide sequence portion
gugcccgcaacuuuguguug

SEQ ID NO: 10639 - RNA, 20 nt, Artificial Sequence
  SARM1 targeting guide sequence portion
gugcuaucaccuggagcacu

SEQ ID NO: 10640 - RNA, 20 nt, Artificial Sequence
  SARM1 targeting guide sequence portion
gugcuccaggugauagcacc

SEQ ID NO: 10641 - RNA, 20 nt, Artificial Sequence
  SARM1 targeting guide sequence portion
guggagaagcuggaagcagg

SEQ ID NO: 10642 - RNA, 20 nt, Artificial Sequence
  SARM1 targeting guide sequence portion
gugucaugggugcccgcaac

SEQ ID NO: 10643 - RNA, 20 nt, Artificial Sequence
  SARM1 targeting guide sequence portion
gugucuucauugauguggag

SEQ ID NO: 10644 - RNA, 20 nt, Artificial Sequence
  SARM1 targeting guide sequence portion
guguuggugcuaucaccugg

SEQ ID NO: 10645 - RNA, 20 nt, Artificial Sequence
  SARM1 targeting guide sequence portion
guucgaggacaaacucaucc

SEQ ID NO: 10646 - RNA, 20 nt, Artificial Sequence
  SARM1 targeting guide sequence portion
guugcgggcacccaugacac

SEQ ID NO: 10647 - RNA, 20 nt, Artificial Sequence
  SARM1 targeting guide sequence portion
guuggugcuaucaccuggag

SEQ ID NO: 10648 - RNA, 20 nt, Artificial Sequence
  SARM1 targeting guide sequence portion
guuuguccucgaacuugccu

SEQ ID NO: 10649 - RNA, 20 nt, Artificial Sequence
  SARM1 targeting guide sequence portion
uaccuuaugcacccaauccu

SEQ ID NO: 10650 - RNA, 20 nt, Artificial Sequence
  SARM1 targeting guide sequence portion
uagcaccaacacaaaguugc

SEQ ID NO: 10651 - RNA, 20 nt, Artificial Sequence
  SARM1 targeting guide sequence portion
uaucaccuggagcacuggac

SEQ ID NO: 10652 - RNA, 20 nt, Artificial Sequence
  SARM1 targeting guide sequence portion
uaugcacccaauccuugcag

SEQ ID NO: 10653 - RNA, 20 nt, Artificial Sequence
  SARM1 targeting guide sequence portion
ucaaugaagacacugaagcc

SEQ ID NO: 10654 - RNA, 20 nt, Artificial Sequence
  SARM1 targeting guide sequence portion
ucaccuggagcacuggacaa

SEQ ID NO: 10655 - RNA, 20 nt, Artificial Sequence
  SARM1 targeting guide sequence portion
ucagugucuucauugaugug

SEQ ID NO: 10656 - RNA, 20 nt, Artificial Sequence
  SARM1 targeting guide sequence portion
ucauccagagugucaugggu

SEQ ID NO: 10657 - RNA, 20 nt, Artificial Sequence
  SARM1 targeting guide sequence portion
ucaugggugcccgcaacuuu

SEQ ID NO: 10658 - RNA, 20 nt, Artificial Sequence
  SARM1 targeting guide sequence portion
ucauggucuugcaugcacuu

SEQ ID NO: 10659 - RNA, 20 nt, Artificial Sequence
  SARM1 targeting guide sequence portion
ucauugauguggagaagcug

SEQ ID NO: 10660 - RNA, 20 nt, Artificial Sequence
  SARM1 targeting guide sequence portion
uccacaucaaugaagacacu

SEQ ID NO: 10661 - RNA, 20 nt, Artificial Sequence
  SARM1 targeting guide sequence portion
uccagagugucaugggugcc

SEQ ID NO: 10662 - RNA, 20 nt, Artificial Sequence
  SARM1 targeting guide sequence portion
uccagcuucuccacaucaau

SEQ ID NO: 10663 - RNA, 20 nt, Artificial Sequence
  SARM1 targeting guide sequence portion
uccaggugauagcaccaaca

SEQ ID NO: 10664 - RNA, 20 nt, Artificial Sequence
  SARM1 targeting guide sequence portion
uccagugcuccaggugauag

SEQ ID NO: 10665 - RNA, 20 nt, Artificial Sequence
  SARM1 targeting guide sequence portion
uccucgaacuugccugcuuc

SEQ ID NO: 10666 - RNA, 20 nt, Artificial Sequence
  SARM1 targeting guide sequence portion
uccugaaggugcaccugcag

SEQ ID NO: 10667 - RNA, 20 nt, Artificial Sequence
  SARM1 targeting guide sequence portion
uccuugcagucauggucuug

SEQ ID NO: 10668 - RNA, 20 nt, Artificial Sequence
  SARM1 targeting guide sequence portion
ucgaacuugccugcuuccag

SEQ ID NO: 10669 - RNA, 20 nt, Artificial Sequence
  SARM1 targeting guide sequence portion
ucgaggacaaacucauccag

SEQ ID NO: 10670 - RNA, 20 nt, Artificial Sequence
  SARM1 targeting guide sequence portion
ucuccacaucaaugaagaca

SEQ ID NO: 10671 - RNA, 20 nt, Artificial Sequence
  SARM1 targeting guide sequence portion
ucuccugaaggugcaccugc

SEQ ID NO: 10672 - RNA, 20 nt, Artificial Sequence
  SARM1 targeting guide sequence portion
ucuggaugaguuuguccucg

SEQ ID NO: 10673 - RNA, 20 nt, Artificial Sequence
  SARM1 targeting guide sequence portion
ucuucauugauguggagaag

SEQ ID NO: 10674 - RNA, 20 nt, Artificial Sequence
  SARM1 targeting guide sequence portion
ucuugcaugcacuuguccag

SEQ ID NO: 10675 - RNA, 20 nt, Artificial Sequence
  SARM1 targeting guide sequence portion
ugaagacacugaagccaugc

SEQ ID NO: 10676 - RNA, 20 nt, Artificial Sequence
  SARM1 targeting guide sequence portion
ugaagccaugcagcugcagg

SEQ ID NO: 10677 - RNA, 20 nt, Artificial Sequence
  SARM1 targeting guide sequence portion
ugaaggugcaccugcagcug

SEQ ID NO: 10678 - RNA, 20 nt, Artificial Sequence
  SARM1 targeting guide sequence portion
ugacacucuggaugaguuug

SEQ ID NO: 10679 - RNA, 20 nt, Artificial Sequence
  SARM1 targeting guide sequence portion
ugacugcaaggauugggugc

SEQ ID NO: 10680 - RNA, 20 nt, Artificial Sequence
  SARM1 targeting guide sequence portion
ugaguuuguccucgaacuug

SEQ ID NO: 10681 - RNA, 20 nt, Artificial Sequence
  SARM1 targeting guide sequence portion
ugauagcaccaacacaaagu

SEQ ID NO: 10682 - RNA, 20 nt, Artificial Sequence
  SARM1 targeting guide sequence portion
ugauguggagaagcuggaag

SEQ ID NO: 10683 - RNA, 20 nt, Artificial Sequence
  SARM1 targeting guide sequence portion
ugcaagaccaugacugcaag

SEQ ID NO: 10684 - RNA, 20 nt, Artificial Sequence
  SARM1 targeting guide sequence portion
ugcaaggauugggugcauaa

SEQ ID NO: 10685 - RNA, 20 nt, Artificial Sequence
  SARM1 targeting guide sequence portion
ugcacccaauccuugcaguc

SEQ ID NO: 10686 - RNA, 20 nt, Artificial Sequence
  SARM1 targeting guide sequence portion
ugcaccugcagcugcauggc

SEQ ID NO: 10687 - RNA, 20 nt, Artificial Sequence
  SARM1 targeting guide sequence portion
ugcacuuguccagugcucca

SEQ ID NO: 10688 - RNA, 20 nt, Artificial Sequence
  SARM1 targeting guide sequence portion
ugcagcugcaggugcaccuu

SEQ ID NO: 10689 - RNA, 20 nt, Artificial Sequence
  SARM1 targeting guide sequence portion
ugcagcugcauggcuucagu

SEQ ID NO: 10690 - RNA, 20 nt, Artificial Sequence
  SARM1 targeting guide sequence portion
ugcaggugcaccuucaggag

SEQ ID NO: 10691 - RNA, 20 nt, Artificial Sequence
  SARM1 targeting guide sequence portion
ugcagucauggucuugcaug

SEQ ID NO: 10692 - RNA, 20 nt, Artificial Sequence
  SARM1 targeting guide sequence portion
ugcagucuccugaaggugca

SEQ ID NO: 10693 - RNA, 20 nt, Artificial Sequence
  SARM1 targeting guide sequence portion
ugcaugcaagaccaugacug

SEQ ID NO: 10694 - RNA, 20 nt, Artificial Sequence
  SARM1 targeting guide sequence portion
ugcaugcacuuguccagugc

SEQ ID NO: 10695 - RNA, 20 nt, Artificial Sequence
  SARM1 targeting guide sequence portion
ugcauggcuucagugucuuc

SEQ ID NO: 10696 - RNA, 20 nt, Artificial Sequence
  SARM1 targeting guide sequence portion
ugcccgcaacuuuguguugg

SEQ ID NO: 10697 - RNA, 20 nt, Artificial Sequence
  SARM1 targeting guide sequence portion
ugccugcuuccagcuucucc

SEQ ID NO: 10698 - RNA, 20 nt, Artificial Sequence
  SARM1 targeting guide sequence portion
ugcgggcacccaugacacuc

SEQ ID NO: 10699 - RNA, 20 nt, Artificial Sequence
  SARM1 targeting guide sequence portion
ugcuaucaccuggagcacug

SEQ ID NO: 10700 - RNA, 20 nt, Artificial Sequence
  SARM1 targeting guide sequence portion
ugcuccaggugauagcacca

SEQ ID NO: 10701 - RNA, 20 nt, Artificial Sequence
  SARM1 targeting guide sequence portion
ugcuuccagcuucuccacau

SEQ ID NO: 10702 - RNA, 20 nt, Artificial Sequence
  SARM1 targeting guide sequence portion
uggaagcaggcaaguucgag

SEQ ID NO: 10703 - RNA, 20 nt, Artificial Sequence
  SARM1 targeting guide sequence portion
uggacaagugcaugcaagac

SEQ ID NO: 10704 - RNA, 20 nt, Artificial Sequence
  SARM1 targeting guide sequence portion
uggagaagcuggaagcaggc

SEQ ID NO: 10705 - RNA, 20 nt, Artificial Sequence
  SARM1 targeting guide sequence portion
uggagcacuggacaagugca

SEQ ID NO: 10706 - RNA, 20 nt, Artificial Sequence
  SARM1 targeting guide sequence portion
uggaugaguuuguccucgaa

SEQ ID NO: 10707 - RNA, 20 nt, Artificial Sequence
  SARM1 targeting guide sequence portion
uggcuucagugucuucauug

SEQ ID NO: 10708 - RNA, 20 nt, Artificial Sequence
  SARM1 targeting guide sequence portion
ugggugcccgcaacuuugug

SEQ ID NO: 10709 - RNA, 20 nt, Artificial Sequence
  SARM1 targeting guide sequence portion
uggucuugcaugcacuuguc

SEQ ID NO: 10710 - RNA, 20 nt, Artificial Sequence
  SARM1 targeting guide sequence portion
uggugcuaucaccuggagca

SEQ ID NO: 10711 - RNA, 20 nt, Artificial Sequence
  SARM1 targeting guide sequence portion
ugucaugggugcccgcaacu

SEQ ID NO: 10712 - RNA, 20 nt, Artificial Sequence
  SARM1 targeting guide sequence portion
uguccagugcuccaggugau

SEQ ID NO: 10713 - RNA, 20 nt, Artificial Sequence
  SARM1 targeting guide sequence portion
uguccucgaacuugccugcu

SEQ ID NO: 10714 - RNA, 20 nt, Artificial Sequence
  SARM1 targeting guide sequence portion
ugucuucauugauguggaga

SEQ ID NO: 10715 - RNA, 20 nt, Artificial Sequence
  SARM1 targeting guide sequence portion
uguggagaagcuggaagcag

SEQ ID NO: 10716 - RNA, 20 nt, Artificial Sequence
  SARM1 targeting guide sequence portion
uguguuggugcuaucaccug

SEQ ID NO: 10717 - RNA, 20 nt, Artificial Sequence
  SARM1 targeting guide sequence portion
uguuggugcuaucaccugga

SEQ ID NO: 10718 - RNA, 20 nt, Artificial Sequence
  SARM1 targeting guide sequence portion
uuaugcacccaauccuugca

SEQ ID NO: 10719 - RNA, 20 nt, Artificial Sequence
  SARM1 targeting guide sequence portion
uucagugucuucauugaugu

SEQ ID NO: 10720 - RNA, 20 nt, Artificial Sequence
  SARM1 targeting guide sequence portion
uucauugauguggagaagcu

SEQ ID NO: 10721 - RNA, 20 nt, Artificial Sequence
  SARM1 targeting guide sequence portion
uuccagcuucuccacaucaa

SEQ ID NO: 10722 - RNA, 20 nt, Artificial Sequence
  SARM1 targeting guide sequence portion
uucgaggacaaacucaucca

SEQ ID NO: 10723 - RNA, 20 nt, Artificial Sequence
  SARM1 targeting guide sequence portion
uucuccacaucaaugaagac

SEQ ID NO: 10724 - RNA, 20 nt, Artificial Sequence
  SARM1 targeting guide sequence portion
uugauguggagaagcuggaa

SEQ ID NO: 10725 - RNA, 20 nt, Artificial Sequence
  SARM1 targeting guide sequence portion
uugcagucauggucuugcau

SEQ ID NO: 10726 - RNA, 20 nt, Artificial Sequence
  SARM1 targeting guide sequence portion
uugcagucuccugaaggugc

SEQ ID NO: 10727 - RNA, 20 nt, Artificial Sequence
  SARM1 targeting guide sequence portion
uugcaugcacuuguccagug

SEQ ID NO: 10728 - RNA, 20 nt, Artificial Sequence
  SARM1 targeting guide sequence portion
uugccugcuuccagcuucuc

SEQ ID NO: 10729 - RNA, 20 nt, Artificial Sequence
  SARM1 targeting guide sequence portion
uugcgggcacccaugacacu

SEQ ID NO: 10730 - RNA, 20 nt, Artificial Sequence
  SARM1 targeting guide sequence portion
uuggugcuaucaccuggagc

SEQ ID NO: 10731 - RNA, 20 nt, Artificial Sequence
  SARM1 targeting guide sequence portion
uuguccagugcuccagguga

SEQ ID NO: 10732 - RNA, 20 nt, Artificial Sequence
  SARM1 targeting guide sequence portion
uuguccucgaacuugccugc

SEQ ID NO: 10733 - RNA, 20 nt, Artificial Sequence
  SARM1 targeting guide sequence portion
uuguguuggugcuaucaccu

SEQ ID NO: 10734 - RNA, 20 nt, Artificial Sequence
  SARM1 targeting guide sequence portion
uuuguccucgaacuugccug

SEQ ID NO: 10735 - RNA, 20 nt, Artificial Sequence
  SARM1 targeting guide sequence portion
uuuguguuggugcuaucacc

SEQ ID NO: 10736 - RNA, 21 nt, Artificial Sequence
  SARM1 targeting guide sequence portion
aaacucauccagagugucaug

SEQ ID NO: 10737 - RNA, 21 nt, Artificial Sequence
  SARM1 targeting guide sequence portion
aaaguugcgggcacccaugac

SEQ ID NO: 10738 - RNA, 21 nt, Artificial Sequence
  SARM1 targeting guide sequence portion
aacacaaaguugcgggcaccc

SEQ ID NO: 10739 - RNA, 21 nt, Artificial Sequence
  SARM1 targeting guide sequence portion
aacucauccagagugucaugg

SEQ ID NO: 10740 - RNA, 21 nt, Artificial Sequence
  SARM1 targeting guide sequence portion
aacuugccugcuuccagcuuc

SEQ ID NO: 10741 - RNA, 21 nt, Artificial Sequence
  SARM1 targeting guide sequence portion
aacuuuguguuggugcuauca

SEQ ID NO: 10742 - RNA, 21 nt, Artificial Sequence
  SARM1 targeting guide sequence portion
aagacacugaagccaugcagc

SEQ ID NO: 10743 - RNA, 21 nt, Artificial Sequence
  SARM1 targeting guide sequence portion
aagaccaugacugcaaggauu

SEQ ID NO: 10744 - RNA, 21 nt, Artificial Sequence
  SARM1 targeting guide sequence portion
aagcaggcaaguucgaggaca

SEQ ID NO: 10745 - RNA, 21 nt, Artificial Sequence
  SARM1 targeting guide sequence portion
aagccaugcagcugcaggugc

SEQ ID NO: 10746 - RNA, 21 nt, Artificial Sequence
  SARM1 targeting guide sequence portion
aagcuggaagcaggcaaguuc

SEQ ID NO: 10747 - RNA, 21 nt, Artificial Sequence
  SARM1 targeting guide sequence portion
aaggugcaccugcagcugcau

SEQ ID NO: 10748 - RNA, 21 nt, Artificial Sequence
  SARM1 targeting guide sequence portion
aagugcaugcaagaccaugac

SEQ ID NO: 10749 - RNA, 21 nt, Artificial Sequence
  SARM1 targeting guide sequence portion
aaguucgaggacaaacucauc

SEQ ID NO: 10750 - RNA, 21 nt, Artificial Sequence
  SARM1 targeting guide sequence portion
aaguugcgggcacccaugaca

SEQ ID NO: 10751 - RNA, 21 nt, Artificial Sequence
  SARM1 targeting guide sequence portion
aauccuugcagucauggucuu

SEQ ID NO: 10752 - RNA, 21 nt, Artificial Sequence
  SARM1 targeting guide sequence portion
aaugaagacacugaagccaug

SEQ ID NO: 10753 - RNA, 21 nt, Artificial Sequence
  SARM1 targeting guide sequence portion
acaaacucauccagaguguca

SEQ ID NO: 10754 - RNA, 21 nt, Artificial Sequence
  SARM1 targeting guide sequence portion
acaaaguugcgggcacccaug

SEQ ID NO: 10755 - RNA, 21 nt, Artificial Sequence
  SARM1 targeting guide sequence portion
acaagugcaugcaagaccaug

SEQ ID NO: 10756 - RNA, 21 nt, Artificial Sequence
  SARM1 targeting guide sequence portion
acacaaaguugcgggcaccca

SEQ ID NO: 10757 - RNA, 21 nt, Artificial Sequence
  SARM1 targeting guide sequence portion
acacucuggaugaguuugucc

SEQ ID NO: 10758 - RNA, 21 nt, Artificial Sequence
  SARM1 targeting guide sequence portion
acacugaagccaugcagcugc

SEQ ID NO: 10759 - RNA, 21 nt, Artificial Sequence
  SARM1 targeting guide sequence portion
acaucaaugaagacacugaag

SEQ ID NO: 10760 - RNA, 21 nt, Artificial Sequence
  SARM1 targeting guide sequence portion
accaacacaaaguugcgggca

SEQ ID NO: 10761 - RNA, 21 nt, Artificial Sequence
  SARM1 targeting guide sequence portion
accaugacugcaaggauuggg

SEQ ID NO: 10762 - RNA, 21 nt, Artificial Sequence
  SARM1 targeting guide sequence portion
acccaauccuugcagucaugg

SEQ ID NO: 10763 - RNA, 21 nt, Artificial Sequence
  SARM1 targeting guide sequence portion
acccaugacacucuggaugag

SEQ ID NO: 10764 - RNA, 21 nt, Artificial Sequence
  SARM1 targeting guide sequence portion
accuaccuuaugcacccaauc

SEQ ID NO: 10765 - RNA, 21 nt, Artificial Sequence
  SARM1 targeting guide sequence portion
accugcagcugcauggcuuca

SEQ ID NO: 10766 - RNA, 21 nt, Artificial Sequence
  SARM1 targeting guide sequence portion
accuggagcacuggacaagug

SEQ ID NO: 10767 - RNA, 21 nt, Artificial Sequence
  SARM1 targeting guide sequence portion
accuuaugcacccaauccuug

SEQ ID NO: 10768 - RNA, 21 nt, Artificial Sequence
  SARM1 targeting guide sequence portion
acucauccagagugucauggg

SEQ ID NO: 10769 - RNA, 21 nt, Artificial Sequence
  SARM1 targeting guide sequence portion
acucuggaugaguuuguccuc

SEQ ID NO: 10770 - RNA, 21 nt, Artificial Sequence
  SARM1 targeting guide sequence portion
acugaagccaugcagcugcag

SEQ ID NO: 10771 - RNA, 21 nt, Artificial Sequence
  SARM1 targeting guide sequence portion
acugcaaggauugggugcaua

SEQ ID NO: 10772 - RNA, 21 nt, Artificial Sequence
  SARM1 targeting guide sequence portion
acuggacaagugcaugcaaga

SEQ ID NO: 10773 - RNA, 21 nt, Artificial Sequence
  SARM1 targeting guide sequence portion
acuugccugcuuccagcuucu

SEQ ID NO: 10774 - RNA, 21 nt, Artificial Sequence
  SARM1 targeting guide sequence portion
acuuguccagugcuccaggug

SEQ ID NO: 10775 - RNA, 21 nt, Artificial Sequence
  SARM1 targeting guide sequence portion
acuuuguguuggugcuaucac

SEQ ID NO: 10776 - RNA, 21 nt, Artificial Sequence
  SARM1 targeting guide sequence portion
agaagcuggaagcaggcaagu

SEQ ID NO: 10777 - RNA, 21 nt, Artificial Sequence
  SARM1 targeting guide sequence portion
agacacugaagccaugcagcu

SEQ ID NO: 10778 - RNA, 21 nt, Artificial Sequence
  SARM1 targeting guide sequence portion
agaccaugacugcaaggauug

SEQ ID NO: 10779 - RNA, 21 nt, Artificial Sequence
  SARM1 targeting guide sequence portion
agagugucaugggugcccgca

SEQ ID NO: 10780 - RNA, 21 nt, Artificial Sequence
  SARM1 targeting guide sequence portion
agcaccaacacaaaguugcgg

SEQ ID NO: 10781 - RNA, 21 nt, Artificial Sequence
  SARM1 targeting guide sequence portion
agcacuggacaagugcaugca

SEQ ID NO: 10782 - RNA, 21 nt, Artificial Sequence
  SARM1 targeting guide sequence portion
agcaggcaaguucgaggacaa

SEQ ID NO: 10783 - RNA, 21 nt, Artificial Sequence
  SARM1 targeting guide sequence portion
agccaugcagcugcaggugca

SEQ ID NO: 10784 - RNA, 21 nt, Artificial Sequence
  SARM1 targeting guide sequence portion
agcugcaggugcaccuucagg

SEQ ID NO: 10785 - RNA, 21 nt, Artificial Sequence
  SARM1 targeting guide sequence portion
agcugcauggcuucagugucu

SEQ ID NO: 10786 - RNA, 21 nt, Artificial Sequence
  SARM1 targeting guide sequence portion
agcuggaagcaggcaaguucg

SEQ ID NO: 10787 - RNA, 21 nt, Artificial Sequence
  SARM1 targeting guide sequence portion
agcuucuccacaucaaugaag

SEQ ID NO: 10788 - RNA, 21 nt, Artificial Sequence
  SARM1 targeting guide sequence portion
aggacaaacucauccagagug

SEQ ID NO: 10789 - RNA, 21 nt, Artificial Sequence
  SARM1 targeting guide sequence portion
aggcaaguucgaggacaaacu

SEQ ID NO: 10790 - RNA, 21 nt, Artificial Sequence
  SARM1 targeting guide sequence portion
aggugauagcaccaacacaaa

SEQ ID NO: 10791 - RNA, 21 nt, Artificial Sequence
  SARM1 targeting guide sequence portion
aggugcaccugcagcugcaug

SEQ ID NO: 10792 - RNA, 21 nt, Artificial Sequence
  SARM1 targeting guide sequence portion
agucauggucuugcaugcacu

SEQ ID NO: 10793 - RNA, 21 nt, Artificial Sequence
  SARM1 targeting guide sequence portion
agucuccugaaggugcaccug

SEQ ID NO: 10794 - RNA, 21 nt, Artificial Sequence
  SARM1 targeting guide sequence portion
agugcaugcaagaccaugacu

SEQ ID NO: 10795 - RNA, 21 nt, Artificial Sequence
  SARM1 targeting guide sequence portion
agugcuccaggugauagcacc

SEQ ID NO: 10796 - RNA, 21 nt, Artificial Sequence
  SARM1 targeting guide sequence portion
agugucaugggugcccgcaac

SEQ ID NO: 10797 - RNA, 21 nt, Artificial Sequence
  SARM1 targeting guide sequence portion
agugucuucauugauguggag

SEQ ID NO: 10798 - RNA, 21 nt, Artificial Sequence
  SARM1 targeting guide sequence portion
aguucgaggacaaacucaucc

SEQ ID NO: 10799 - RNA, 21 nt, Artificial Sequence
  SARM1 targeting guide sequence portion
aguugcgggcacccaugacac

SEQ ID NO: 10800 - RNA, 21 nt, Artificial Sequence
  SARM1 targeting guide sequence portion
aguuuguccucgaacuugccu

SEQ ID NO: 10801 - RNA, 21 nt, Artificial Sequence
  SARM1 targeting guide sequence portion
auagcaccaacacaaaguugc

SEQ ID NO: 10802 - RNA, 21 nt, Artificial Sequence
  SARM1 targeting guide sequence portion
aucaaugaagacacugaagcc

SEQ ID NO: 10803 - RNA, 21 nt, Artificial Sequence
  SARM1 targeting guide sequence portion
aucaccuggagcacuggacaa

SEQ ID NO: 10804 - RNA, 21 nt, Artificial Sequence
  SARM1 targeting guide sequence portion
auccagagugucaugggugcc

SEQ ID NO: 10805 - RNA, 21 nt, Artificial Sequence
  SARM1 targeting guide sequence portion
auccuugcagucauggucuug

SEQ ID NO: 10806 - RNA, 21 nt, Artificial Sequence
  SARM1 targeting guide sequence portion
augaagacacugaagccaugc

SEQ ID NO: 10807 - RNA, 21 nt, Artificial Sequence
  SARM1 targeting guide sequence portion
augacacucuggaugaguuug

SEQ ID NO: 10808 - RNA, 21 nt, Artificial Sequence
  SARM1 targeting guide sequence portion
augacugcaaggauugggugc

SEQ ID NO: 10809 - RNA, 21 nt, Artificial Sequence
  SARM1 targeting guide sequence portion
augaguuuguccucgaacuug

SEQ ID NO: 10810 - RNA, 21 nt, Artificial Sequence
  SARM1 targeting guide sequence portion
augcaagaccaugacugcaag

SEQ ID NO: 10811 - RNA, 21 nt, Artificial Sequence
  SARM1 targeting guide sequence portion
augcacccaauccuugcaguc

SEQ ID NO: 10812 - RNA, 21 nt, Artificial Sequence
  SARM1 targeting guide sequence portion
augcacuuguccagugcucca

SEQ ID NO: 10813 - RNA, 21 nt, Artificial Sequence
  SARM1 targeting guide sequence portion
augcagcugcaggugcaccuu

SEQ ID NO: 10814 - RNA, 21 nt, Artificial Sequence
  SARM1 targeting guide sequence portion
auggcuucagugucuucauug

SEQ ID NO: 10815 - RNA, 21 nt, Artificial Sequence
  SARM1 targeting guide sequence portion
augggugcccgcaacuuugug

SEQ ID NO: 10816 - RNA, 21 nt, Artificial Sequence
  SARM1 targeting guide sequence portion
auggucuugcaugcacuuguc

SEQ ID NO: 10817 - RNA, 21 nt, Artificial Sequence
  SARM1 targeting guide sequence portion
auguggagaagcuggaagcag

SEQ ID NO: 10818 - RNA, 21 nt, Artificial Sequence
  SARM1 targeting guide sequence portion
auugauguggagaagcuggaa

SEQ ID NO: 10819 - RNA, 21 nt, Artificial Sequence
  SARM1 targeting guide sequence portion
caaacucauccagagugucau

SEQ ID NO: 10820 - RNA, 21 nt, Artificial Sequence
  SARM1 targeting guide sequence portion
caaaguugcgggcacccauga

SEQ ID NO: 10821 - RNA, 21 nt, Artificial Sequence
  SARM1 targeting guide sequence portion
caacacaaaguugcgggcacc

SEQ ID NO: 10822 - RNA, 21 nt, Artificial Sequence
  SARM1 targeting guide sequence portion
caacuuuguguuggugcuauc

SEQ ID NO: 10823 - RNA, 21 nt, Artificial Sequence
  SARM1 targeting guide sequence portion
caagaccaugacugcaaggau

SEQ ID NO: 10824 - RNA, 21 nt, Artificial Sequence
  SARM1 targeting guide sequence portion
caagugcaugcaagaccauga

SEQ ID NO: 10825 - RNA, 21 nt, Artificial Sequence
  SARM1 targeting guide sequence portion
caaguucgaggacaaacucau

SEQ ID NO: 10826 - RNA, 21 nt, Artificial Sequence
  SARM1 targeting guide sequence portion
caauccuugcagucauggucu

SEQ ID NO: 10827 - RNA, 21 nt, Artificial Sequence
  SARM1 targeting guide sequence portion
caaugaagacacugaagccau

SEQ ID NO: 10828 - RNA, 21 nt, Artificial Sequence
  SARM1 targeting guide sequence portion
cacaaaguugcgggcacccau

SEQ ID NO: 10829 - RNA, 21 nt, Artificial Sequence
  SARM1 targeting guide sequence portion
cacaucaaugaagacacugaa

SEQ ID NO: 10830 - RNA, 21 nt, Artificial Sequence
  SARM1 targeting guide sequence portion
caccaacacaaaguugcgggc

SEQ ID NO: 10831 - RNA, 21 nt, Artificial Sequence
  SARM1 targeting guide sequence portion
cacccaauccuugcagucaug

SEQ ID NO: 10832 - RNA, 21 nt, Artificial Sequence
  SARM1 targeting guide sequence portion
cacccaugacacucuggauga

SEQ ID NO: 10833 - RNA, 21 nt, Artificial Sequence
  SARM1 targeting guide sequence portion
caccuaccuuaugcacccaau

SEQ ID NO: 10834 - RNA, 21 nt, Artificial Sequence
  SARM1 targeting guide sequence portion
caccugcagcugcauggcuuc

SEQ ID NO: 10835 - RNA, 21 nt, Artificial Sequence
  SARM1 targeting guide sequence portion
caccuggagcacuggacaagu

SEQ ID NO: 10836 - RNA, 21 nt, Artificial Sequence
  SARM1 targeting guide sequence portion
cacucuggaugaguuuguccu

SEQ ID NO: 10837 - RNA, 21 nt, Artificial Sequence
  SARM1 targeting guide sequence portion
cacugaagccaugcagcugca

SEQ ID NO: 10838 - RNA, 21 nt, Artificial Sequence
  SARM1 targeting guide sequence portion
cacuggacaagugcaugcaag

SEQ ID NO: 10839 - RNA, 21 nt, Artificial Sequence
  SARM1 targeting guide sequence portion
cacuuguccagugcuccaggu

SEQ ID NO: 10840 - RNA, 21 nt, Artificial Sequence
  SARM1 targeting guide sequence portion
cagagugucaugggugcccgc

SEQ ID NO: 10841 - RNA, 21 nt, Artificial Sequence
  SARM1 targeting guide sequence portion
cagcugcaggugcaccuucag

SEQ ID NO: 10842 - RNA, 21 nt, Artificial Sequence
  SARM1 targeting guide sequence portion
cagcugcauggcuucaguguc

SEQ ID NO: 10843 - RNA, 21 nt, Artificial Sequence
  SARM1 targeting guide sequence portion
cagcuucuccacaucaaugaa

SEQ ID NO: 10844 - RNA, 21 nt, Artificial Sequence
  SARM1 targeting guide sequence portion
caggcaaguucgaggacaaac

SEQ ID NO: 10845 - RNA, 21 nt, Artificial Sequence
  SARM1 targeting guide sequence portion
caggugauagcaccaacacaa

SEQ ID NO: 10846 - RNA, 21 nt, Artificial Sequence
  SARM1 targeting guide sequence portion
cagucauggucuugcaugcac

SEQ ID NO: 10847 - RNA, 21 nt, Artificial Sequence
  SARM1 targeting guide sequence portion
cagucuccugaaggugcaccu

SEQ ID NO: 10848 - RNA, 21 nt, Artificial Sequence
  SARM1 targeting guide sequence portion
cagugcuccaggugauagcac

SEQ ID NO: 10849 - RNA, 21 nt, Artificial Sequence
  SARM1 targeting guide sequence portion
cagugucuucauugaugugga

SEQ ID NO: 10850 - RNA, 21 nt, Artificial Sequence
  SARM1 targeting guide sequence portion
caucaaugaagacacugaagc

SEQ ID NO: 10851 - RNA, 21 nt, Artificial Sequence
  SARM1 targeting guide sequence portion
cauccagagugucaugggugc

SEQ ID NO: 10852 - RNA, 21 nt, Artificial Sequence
  SARM1 targeting guide sequence portion
caugacacucuggaugaguuu

SEQ ID NO: 10853 - RNA, 21 nt, Artificial Sequence
  SARM1 targeting guide sequence portion
caugacugcaaggauugggug

SEQ ID NO: 10854 - RNA, 21 nt, Artificial Sequence
  SARM1 targeting guide sequence portion
caugcaagaccaugacugcaa

SEQ ID NO: 10855 - RNA, 21 nt, Artificial Sequence
  SARM1 targeting guide sequence portion
caugcacuuguccagugcucc

SEQ ID NO: 10856 - RNA, 21 nt, Artificial Sequence
  SARM1 targeting guide sequence portion
caugcagcugcaggugcaccu

SEQ ID NO: 10857 - RNA, 21 nt, Artificial Sequence
  SARM1 targeting guide sequence portion
cauggcuucagugucuucauu

SEQ ID NO: 10858 - RNA, 21 nt, Artificial Sequence
  SARM1 targeting guide sequence portion
caugggugcccgcaacuuugu

SEQ ID NO: 10859 - RNA, 21 nt, Artificial Sequence
  SARM1 targeting guide sequence portion
cauggucuugcaugcacuugu

SEQ ID NO: 10860 - RNA, 21 nt, Artificial Sequence
  SARM1 targeting guide sequence portion
cauugauguggagaagcugga

SEQ ID NO: 10861 - RNA, 21 nt, Artificial Sequence
  SARM1 targeting guide sequence portion
ccaacacaaaguugcgggcac

SEQ ID NO: 10862 - RNA, 21 nt, Artificial Sequence
  SARM1 targeting guide sequence portion
ccaauccuugcagucaugguc

SEQ ID NO: 10863 - RNA, 21 nt, Artificial Sequence
  SARM1 targeting guide sequence portion
ccacaucaaugaagacacuga

SEQ ID NO: 10864 - RNA, 21 nt, Artificial Sequence
  SARM1 targeting guide sequence portion
ccagagugucaugggugcccg

SEQ ID NO: 10865 - RNA, 21 nt, Artificial Sequence
  SARM1 targeting guide sequence portion
ccagcuucuccacaucaauga

SEQ ID NO: 10866 - RNA, 21 nt, Artificial Sequence
  SARM1 targeting guide sequence portion
ccaggugauagcaccaacaca

SEQ ID NO: 10867 - RNA, 21 nt, Artificial Sequence
  SARM1 targeting guide sequence portion
ccagugcuccaggugauagca

SEQ ID NO: 10868 - RNA, 21 nt, Artificial Sequence
  SARM1 targeting guide sequence portion
ccaugacacucuggaugaguu

SEQ ID NO: 10869 - RNA, 21 nt, Artificial Sequence
  SARM1 targeting guide sequence portion
ccaugacugcaaggauugggu

SEQ ID NO: 10870 - RNA, 21 nt, Artificial Sequence
  SARM1 targeting guide sequence portion
ccaugcagcugcaggugcacc

SEQ ID NO: 10871 - RNA, 21 nt, Artificial Sequence
  SARM1 targeting guide sequence portion
cccaauccuugcagucauggu

SEQ ID NO: 10872 - RNA, 21 nt, Artificial Sequence
  SARM1 targeting guide sequence portion
cccaugacacucuggaugagu

SEQ ID NO: 10873 - RNA, 21 nt, Artificial Sequence
  SARM1 targeting guide sequence portion
cccgcaacuuuguguuggugc

SEQ ID NO: 10874 - RNA, 21 nt, Artificial Sequence
  SARM1 targeting guide sequence portion
ccgcaacuuuguguuggugcu

SEQ ID NO: 10875 - RNA, 21 nt, Artificial Sequence
  SARM1 targeting guide sequence portion
ccuaccuuaugcacccaaucc

SEQ ID NO: 10876 - RNA, 21 nt, Artificial Sequence
  SARM1 targeting guide sequence portion
ccucgaacuugccugcuucca

SEQ ID NO: 10877 - RNA, 21 nt, Artificial Sequence
  SARM1 targeting guide sequence portion
ccugaaggugcaccugcagcu

SEQ ID NO: 10878 - RNA, 21 nt, Artificial Sequence
  SARM1 targeting guide sequence portion
ccugcagcugcauggcuucag

SEQ ID NO: 10879 - RNA, 21 nt, Artificial Sequence
  SARM1 targeting guide sequence portion
ccugcuuccagcuucuccaca

SEQ ID NO: 10880 - RNA, 21 nt, Artificial Sequence
  SARM1 targeting guide sequence portion
ccuggagcacuggacaagugc

SEQ ID NO: 10881 - RNA, 21 nt, Artificial Sequence
  SARM1 targeting guide sequence portion
ccuuaugcacccaauccuugc

SEQ ID NO: 10882 - RNA, 21 nt, Artificial Sequence
  SARM1 targeting guide sequence portion
ccuugcagucauggucuugca

SEQ ID NO: 10883 - RNA, 21 nt, Artificial Sequence
  SARM1 targeting guide sequence portion
cgaacuugccugcuuccagcu

SEQ ID NO: 10884 - RNA, 21 nt, Artificial Sequence
  SARM1 targeting guide sequence portion
cgaggacaaacucauccagag

SEQ ID NO: 10885 - RNA, 21 nt, Artificial Sequence
  SARM1 targeting guide sequence portion
cgcaacuuuguguuggugcua

SEQ ID NO: 10886 - RNA, 21 nt, Artificial Sequence
  SARM1 targeting guide sequence portion
cgggcacccaugacacucugg

SEQ ID NO: 10887 - RNA, 21 nt, Artificial Sequence
  SARM1 targeting guide sequence portion
cuaccuuaugcacccaauccu

SEQ ID NO: 10888 - RNA, 21 nt, Artificial Sequence
  SARM1 targeting guide sequence portion
cuaucaccuggagcacuggac

SEQ ID NO: 10889 - RNA, 21 nt, Artificial Sequence
  SARM1 targeting guide sequence portion
cucauccagagugucaugggu

SEQ ID NO: 10890 - RNA, 21 nt, Artificial Sequence
  SARM1 targeting guide sequence portion
cuccacaucaaugaagacacu

SEQ ID NO: 10891 - RNA, 21 nt, Artificial Sequence
  SARM1 targeting guide sequence portion
cuccaggugauagcaccaaca

SEQ ID NO: 10892 - RNA, 21 nt, Artificial Sequence
  SARM1 targeting guide sequence portion
cuccugaaggugcaccugcag

SEQ ID NO: 10893 - RNA, 21 nt, Artificial Sequence
  SARM1 targeting guide sequence portion
cucgaacuugccugcuuccag

SEQ ID NO: 10894 - RNA, 21 nt, Artificial Sequence
  SARM1 targeting guide sequence portion
cucuggaugaguuuguccucg

SEQ ID NO: 10895 - RNA, 21 nt, Artificial Sequence
  SARM1 targeting guide sequence portion
cugaagccaugcagcugcagg

SEQ ID NO: 10896 - RNA, 21 nt, Artificial Sequence
  SARM1 targeting guide sequence portion
cugaaggugcaccugcagcug

SEQ ID NO: 10897 - RNA, 21 nt, Artificial Sequence
  SARM1 targeting guide sequence portion
cugcaaggauugggugcauaa

SEQ ID NO: 10898 - RNA, 21 nt, Artificial Sequence
  SARM1 targeting guide sequence portion
cugcagcugcauggcuucagu

SEQ ID NO: 10899 - RNA, 21 nt, Artificial Sequence
  SARM1 targeting guide sequence portion
cugcaggugcaccuucaggag

SEQ ID NO: 10900 - RNA, 21 nt, Artificial Sequence
  SARM1 targeting guide sequence portion
cugcauggcuucagugucuuc

SEQ ID NO: 10901 - RNA, 21 nt, Artificial Sequence
  SARM1 targeting guide sequence portion
cugcuuccagcuucuccacau

SEQ ID NO: 10902 - RNA, 21 nt, Artificial Sequence
  SARM1 targeting guide sequence portion
cuggaagcaggcaaguucgag

SEQ ID NO: 10903 - RNA, 21 nt, Artificial Sequence
  SARM1 targeting guide sequence portion
cuggacaagugcaugcaagac

SEQ ID NO: 10904 - RNA, 21 nt, Artificial Sequence
  SARM1 targeting guide sequence portion
cuggagcacuggacaagugca

SEQ ID NO: 10905 - RNA, 21 nt, Artificial Sequence
  SARM1 targeting guide sequence portion
cuggaugaguuuguccucgaa

SEQ ID NO: 10906 - RNA, 21 nt, Artificial Sequence
  SARM1 targeting guide sequence portion
cuuaugcacccaauccuugca

SEQ ID NO: 10907 - RNA, 21 nt, Artificial Sequence
  SARM1 targeting guide sequence portion
cuucagugucuucauugaugu

SEQ ID NO: 10908 - RNA, 21 nt, Artificial Sequence
  SARM1 targeting guide sequence portion
cuucauugauguggagaagcu

SEQ ID NO: 10909 - RNA, 21 nt, Artificial Sequence
  SARM1 targeting guide sequence portion
cuuccagcuucuccacaucaa

SEQ ID NO: 10910 - RNA, 21 nt, Artificial Sequence
  SARM1 targeting guide sequence portion
cuucuccacaucaaugaagac

SEQ ID NO: 10911 - RNA, 21 nt, Artificial Sequence
  SARM1 targeting guide sequence portion
cuugcagucauggucuugcau

SEQ ID NO: 10912 - RNA, 21 nt, Artificial Sequence
  SARM1 targeting guide sequence portion
cuugcagucuccugaaggugc

SEQ ID NO: 10913 - RNA, 21 nt, Artificial Sequence
  SARM1 targeting guide sequence portion
cuugcaugcacuuguccagug

SEQ ID NO: 10914 - RNA, 21 nt, Artificial Sequence
  SARM1 targeting guide sequence portion
cuugccugcuuccagcuucuc

SEQ ID NO: 10915 - RNA, 21 nt, Artificial Sequence
  SARM1 targeting guide sequence portion
cuuguccagugcuccagguga

SEQ ID NO: 10916 - RNA, 21 nt, Artificial Sequence
  SARM1 targeting guide sequence portion
cuuuguguuggugcuaucacc

SEQ ID NO: 10917 - RNA, 21 nt, Artificial Sequence
  SARM1 targeting guide sequence portion
gaacuugccugcuuccagcuu

SEQ ID NO: 10918 - RNA, 21 nt, Artificial Sequence
  SARM1 targeting guide sequence portion
gaagacacugaagccaugcag

SEQ ID NO: 10919 - RNA, 21 nt, Artificial Sequence
  SARM1 targeting guide sequence portion
gaagcaggcaaguucgaggac

SEQ ID NO: 10920 - RNA, 21 nt, Artificial Sequence
  SARM1 targeting guide sequence portion
gaagccaugcagcugcaggug

SEQ ID NO: 10921 - RNA, 21 nt, Artificial Sequence
  SARM1 targeting guide sequence portion
gaagcuggaagcaggcaaguu

SEQ ID NO: 10922 - RNA, 21 nt, Artificial Sequence
  SARM1 targeting guide sequence portion
gaaggugcaccugcagcugca

SEQ ID NO: 10923 - RNA, 21 nt, Artificial Sequence
  SARM1 targeting guide sequence portion
gacaaacucauccagaguguc

SEQ ID NO: 10924 - RNA, 21 nt, Artificial Sequence
  SARM1 targeting guide sequence portion
gacaagugcaugcaagaccau

SEQ ID NO: 10925 - RNA, 21 nt, Artificial Sequence
  SARM1 targeting guide sequence portion
gacacucuggaugaguuuguc

SEQ ID NO: 10926 - RNA, 21 nt, Artificial Sequence
  SARM1 targeting guide sequence portion
gacacugaagccaugcagcug

SEQ ID NO: 10927 - RNA, 21 nt, Artificial Sequence
  SARM1 targeting guide sequence portion
gaccaugacugcaaggauugg

SEQ ID NO: 10928 - RNA, 21 nt, Artificial Sequence
  SARM1 targeting guide sequence portion
gacugcaaggauugggugcau

SEQ ID NO: 10929 - RNA, 21 nt, Artificial Sequence
  SARM1 targeting guide sequence portion
gagaagcuggaagcaggcaag

SEQ ID NO: 10930 - RNA, 21 nt, Artificial Sequence
  SARM1 targeting guide sequence portion
gagcacuggacaagugcaugc

SEQ ID NO: 10931 - RNA, 21 nt, Artificial Sequence
  SARM1 targeting guide sequence portion
gaggacaaacucauccagagu

SEQ ID NO: 10932 - RNA, 21 nt, Artificial Sequence
  SARM1 targeting guide sequence portion
gagugucaugggugcccgcaa

SEQ ID NO: 10933 - RNA, 21 nt, Artificial Sequence
  SARM1 targeting guide sequence portion
gaguuuguccucgaacuugcc

SEQ ID NO: 10934 - RNA, 21 nt, Artificial Sequence
  SARM1 targeting guide sequence portion
gauagcaccaacacaaaguug

SEQ ID NO: 10935 - RNA, 21 nt, Artificial Sequence
  SARM1 targeting guide sequence portion
gaugaguuuguccucgaacuu

SEQ ID NO: 10936 - RNA, 21 nt, Artificial Sequence
  SARM1 targeting guide sequence portion
gauguggagaagcuggaagca

SEQ ID NO: 10937 - RNA, 21 nt, Artificial Sequence
  SARM1 targeting guide sequence portion
gcaacuuuguguuggugcuau

SEQ ID NO: 10938 - RNA, 21 nt, Artificial Sequence
  SARM1 targeting guide sequence portion
gcaagaccaugacugcaagga

SEQ ID NO: 10939 - RNA, 21 nt, Artificial Sequence
  SARM1 targeting guide sequence portion
gcaaggauugggugcauaagg

SEQ ID NO: 10940 - RNA, 21 nt, Artificial Sequence
  SARM1 targeting guide sequence portion
gcaaguucgaggacaaacuca

SEQ ID NO: 10941 - RNA, 21 nt, Artificial Sequence
  SARM1 targeting guide sequence portion
gcaccaacacaaaguugcggg

SEQ ID NO: 10942 - RNA, 21 nt, Artificial Sequence
  SARM1 targeting guide sequence portion
gcacccaauccuugcagucau

SEQ ID NO: 10943 - RNA, 21 nt, Artificial Sequence
  SARM1 targeting guide sequence portion
gcacccaugacacucuggaug

SEQ ID NO: 10944 - RNA, 21 nt, Artificial Sequence
  SARM1 targeting guide sequence portion
gcaccugcagcugcauggcuu

SEQ ID NO: 10945 - RNA, 21 nt, Artificial Sequence
  SARM1 targeting guide sequence portion
gcacuggacaagugcaugcaa

SEQ ID NO: 10946 - RNA, 21 nt, Artificial Sequence
  SARM1 targeting guide sequence portion
gcacuuguccagugcuccagg

SEQ ID NO: 10947 - RNA, 21 nt, Artificial Sequence
  SARM1 targeting guide sequence portion
gcagcugcaggugcaccuuca

SEQ ID NO: 10948 - RNA, 21 nt, Artificial Sequence
  SARM1 targeting guide sequence portion
gcagcugcauggcuucagugu

SEQ ID NO: 10949 - RNA, 21 nt, Artificial Sequence
  SARM1 targeting guide sequence portion
gcaggcaaguucgaggacaaa

SEQ ID NO: 10950 - RNA, 21 nt, Artificial Sequence
  SARM1 targeting guide sequence portion
gcaggugcaccuucaggagac

SEQ ID NO: 10951 - RNA, 21 nt, Artificial Sequence
  SARM1 targeting guide sequence portion
gcagucauggucuugcaugca

SEQ ID NO: 10952 - RNA, 21 nt, Artificial Sequence
  SARM1 targeting guide sequence portion
gcagucuccugaaggugcacc

SEQ ID NO: 10953 - RNA, 21 nt, Artificial Sequence
  SARM1 targeting guide sequence portion
gcaugcaagaccaugacugca

SEQ ID NO: 10954 - RNA, 21 nt, Artificial Sequence
  SARM1 targeting guide sequence portion
gcaugcacuuguccagugcuc

SEQ ID NO: 10955 - RNA, 21 nt, Artificial Sequence
  SARM1 targeting guide sequence portion
gcauggcuucagugucuucau

SEQ ID NO: 10956 - RNA, 21 nt, Artificial Sequence
  SARM1 targeting guide sequence portion
gccaugcagcugcaggugcac

SEQ ID NO: 10957 - RNA, 21 nt, Artificial Sequence
  SARM1 targeting guide sequence portion
gcccgcaacuuuguguuggug

SEQ ID NO: 10958 - RNA, 21 nt, Artificial Sequence
  SARM1 targeting guide sequence portion
gccugcuuccagcuucuccac

SEQ ID NO: 10959 - RNA, 21 nt, Artificial Sequence
  SARM1 targeting guide sequence portion
gcgggcacccaugacacucug

SEQ ID NO: 10960 - RNA, 21 nt, Artificial Sequence
  SARM1 targeting guide sequence portion
gcuaucaccuggagcacugga

SEQ ID NO: 10961 - RNA, 21 nt, Artificial Sequence
  SARM1 targeting guide sequence portion
gcuccaggugauagcaccaac

SEQ ID NO: 10962 - RNA, 21 nt, Artificial Sequence
  SARM1 targeting guide sequence portion
gcugcaggugcaccuucagga

SEQ ID NO: 10963 - RNA, 21 nt, Artificial Sequence
  SARM1 targeting guide sequence portion
gcugcauggcuucagugucuu

SEQ ID NO: 10964 - RNA, 21 nt, Artificial Sequence
  SARM1 targeting guide sequence portion
gcuggaagcaggcaaguucga

SEQ ID NO: 10965 - RNA, 21 nt, Artificial Sequence
  SARM1 targeting guide sequence portion
gcuucagugucuucauugaug

SEQ ID NO: 10966 - RNA, 21 nt, Artificial Sequence
  SARM1 targeting guide sequence portion
gcuuccagcuucuccacauca

SEQ ID NO: 10967 - RNA, 21 nt, Artificial Sequence
  SARM1 targeting guide sequence portion
gcuucuccacaucaaugaaga

SEQ ID NO: 10968 - RNA, 21 nt, Artificial Sequence
  SARM1 targeting guide sequence portion
ggaagcaggcaaguucgagga

SEQ ID NO: 10969 - RNA, 21 nt, Artificial Sequence
  SARM1 targeting guide sequence portion
ggacaaacucauccagagugu

SEQ ID NO: 10970 - RNA, 21 nt, Artificial Sequence
  SARM1 targeting guide sequence portion
ggacaagugcaugcaagacca

SEQ ID NO: 10971 - RNA, 21 nt, Artificial Sequence
  SARM1 targeting guide sequence portion
ggagaagcuggaagcaggcaa

SEQ ID NO: 10972 - RNA, 21 nt, Artificial Sequence
  SARM1 targeting guide sequence portion
ggagcacuggacaagugcaug

SEQ ID NO: 10973 - RNA, 21 nt, Artificial Sequence
  SARM1 targeting guide sequence portion
ggaugaguuuguccucgaacu

SEQ ID NO: 10974 - RNA, 21 nt, Artificial Sequence
  SARM1 targeting guide sequence portion
ggcaaguucgaggacaaacuc

SEQ ID NO: 10975 - RNA, 21 nt, Artificial Sequence
  SARM1 targeting guide sequence portion
ggcacccaugacacucuggau

SEQ ID NO: 10976 - RNA, 21 nt, Artificial Sequence
  SARM1 targeting guide sequence portion
ggcuucagugucuucauugau

SEQ ID NO: 10977 - RNA, 21 nt, Artificial Sequence
  SARM1 targeting guide sequence portion
gggcacccaugacacucugga

SEQ ID NO: 10978 - RNA, 21 nt, Artificial Sequence
  SARM1 targeting guide sequence portion
gggugcccgcaacuuuguguu

SEQ ID NO: 10979 - RNA, 21 nt, Artificial Sequence
  SARM1 targeting guide sequence portion
ggucuugcaugcacuugucca

SEQ ID NO: 10980 - RNA, 21 nt, Artificial Sequence
  SARM1 targeting guide sequence portion
ggugauagcaccaacacaaag

SEQ ID NO: 10981 - RNA, 21 nt, Artificial Sequence
  SARM1 targeting guide sequence portion
ggugcaccugcagcugcaugg

SEQ ID NO: 10982 - RNA, 21 nt, Artificial Sequence
  SARM1 targeting guide sequence portion
ggugcccgcaacuuuguguug

SEQ ID NO: 10983 - RNA, 21 nt, Artificial Sequence
  SARM1 targeting guide sequence portion
ggugcuaucaccuggagcacu

SEQ ID NO: 10984 - RNA, 21 nt, Artificial Sequence
  SARM1 targeting guide sequence portion
gucaugggugcccgcaacuuu

SEQ ID NO: 10985 - RNA, 21 nt, Artificial Sequence
  SARM1 targeting guide sequence portion
gucauggucuugcaugcacuu

SEQ ID NO: 10986 - RNA, 21 nt, Artificial Sequence
  SARM1 targeting guide sequence portion
guccagugcuccaggugauag

SEQ ID NO: 10987 - RNA, 21 nt, Artificial Sequence
  SARM1 targeting guide sequence portion
guccucgaacuugccugcuuc

SEQ ID NO: 10988 - RNA, 21 nt, Artificial Sequence
  SARM1 targeting guide sequence portion
gucuccugaaggugcaccugc

SEQ ID NO: 10989 - RNA, 21 nt, Artificial Sequence
  SARM1 targeting guide sequence portion
gucuucauugauguggagaag

SEQ ID NO: 10990 - RNA, 21 nt, Artificial Sequence
  SARM1 targeting guide sequence portion
gucuugcaugcacuuguccag

SEQ ID NO: 10991 - RNA, 21 nt, Artificial Sequence
  SARM1 targeting guide sequence portion
gugauagcaccaacacaaagu

SEQ ID NO: 10992 - RNA, 21 nt, Artificial Sequence
  SARM1 targeting guide sequence portion
gugcaccugcagcugcauggc

SEQ ID NO: 10993 - RNA, 21 nt, Artificial Sequence
  SARM1 targeting guide sequence portion
gugcaugcaagaccaugacug

SEQ ID NO: 10994 - RNA, 21 nt, Artificial Sequence
  SARM1 targeting guide sequence portion
gugcccgcaacuuuguguugg

SEQ ID NO: 10995 - RNA, 21 nt, Artificial Sequence
  SARM1 targeting guide sequence portion
gugcuaucaccuggagcacug

SEQ ID NO: 10996 - RNA, 21 nt, Artificial Sequence
  SARM1 targeting guide sequence portion
gugcuccaggugauagcacca

SEQ ID NO: 10997 - RNA, 21 nt, Artificial Sequence
  SARM1 targeting guide sequence portion
guggagaagcuggaagcaggc

SEQ ID NO: 10998 - RNA, 21 nt, Artificial Sequence
  SARM1 targeting guide sequence portion
gugucaugggugcccgcaacu

SEQ ID NO: 10999 - RNA, 21 nt, Artificial Sequence
  SARM1 targeting guide sequence portion
gugucuucauugauguggaga

SEQ ID NO: 11000 - RNA, 21 nt, Artificial Sequence
  SARM1 targeting guide sequence portion
guguuggugcuaucaccugga

SEQ ID NO: 11001 - RNA, 21 nt, Artificial Sequence
  SARM1 targeting guide sequence portion
guucgaggacaaacucaucca

SEQ ID NO: 11002 - RNA, 21 nt, Artificial Sequence
  SARM1 targeting guide sequence portion
guugcgggcacccaugacacu

SEQ ID NO: 11003 - RNA, 21 nt, Artificial Sequence
  SARM1 targeting guide sequence portion
guuggugcuaucaccuggagc

SEQ ID NO: 11004 - RNA, 21 nt, Artificial Sequence
  SARM1 targeting guide sequence portion
guuuguccucgaacuugccug

SEQ ID NO: 11005 - RNA, 21 nt, Artificial Sequence
  SARM1 targeting guide sequence portion
uaccuuaugcacccaauccuu

SEQ ID NO: 11006 - RNA, 21 nt, Artificial Sequence
  SARM1 targeting guide sequence portion
uagcaccaacacaaaguugcg

SEQ ID NO: 11007 - RNA, 21 nt, Artificial Sequence
  SARM1 targeting guide sequence portion
uaucaccuggagcacuggaca

SEQ ID NO: 11008 - RNA, 21 nt, Artificial Sequence
  SARM1 targeting guide sequence portion
uaugcacccaauccuugcagu

SEQ ID NO: 11009 - RNA, 21 nt, Artificial Sequence
  SARM1 targeting guide sequence portion
ucaaugaagacacugaagcca

SEQ ID NO: 11010 - RNA, 21 nt, Artificial Sequence
  SARM1 targeting guide sequence portion
ucaccuggagcacuggacaag

SEQ ID NO: 11011 - RNA, 21 nt, Artificial Sequence
  SARM1 targeting guide sequence portion
ucagugucuucauugaugugg

SEQ ID NO: 11012 - RNA, 21 nt, Artificial Sequence
  SARM1 targeting guide sequence portion
ucauccagagugucaugggug

SEQ ID NO: 11013 - RNA, 21 nt, Artificial Sequence
  SARM1 targeting guide sequence portion
ucaugggugcccgcaacuuug

SEQ ID NO: 11014 - RNA, 21 nt, Artificial Sequence
  SARM1 targeting guide sequence portion
ucauggucuugcaugcacuug

SEQ ID NO: 11015 - RNA, 21 nt, Artificial Sequence
  SARM1 targeting guide sequence portion
ucauugauguggagaagcugg

SEQ ID NO: 11016 - RNA, 21 nt, Artificial Sequence
  SARM1 targeting guide sequence portion
uccacaucaaugaagacacug

SEQ ID NO: 11017 - RNA, 21 nt, Artificial Sequence
  SARM1 targeting guide sequence portion
uccagagugucaugggugccc

SEQ ID NO: 11018 - RNA, 21 nt, Artificial Sequence
  SARM1 targeting guide sequence portion
uccagcuucuccacaucaaug

SEQ ID NO: 11019 - RNA, 21 nt, Artificial Sequence
  SARM1 targeting guide sequence portion
uccaggugauagcaccaacac

SEQ ID NO: 11020 - RNA, 21 nt, Artificial Sequence
  SARM1 targeting guide sequence portion
uccagugcuccaggugauagc

SEQ ID NO: 11021 - RNA, 21 nt, Artificial Sequence
  SARM1 targeting guide sequence portion
uccucgaacuugccugcuucc

SEQ ID NO: 11022 - RNA, 21 nt, Artificial Sequence
  SARM1 targeting guide sequence portion
uccugaaggugcaccugcagc

SEQ ID NO: 11023 - RNA, 21 nt, Artificial Sequence
  SARM1 targeting guide sequence portion
uccuugcagucauggucuugc

SEQ ID NO: 11024 - RNA, 21 nt, Artificial Sequence
  SARM1 targeting guide sequence portion
ucgaacuugccugcuuccagc

SEQ ID NO: 11025 - RNA, 21 nt, Artificial Sequence
  SARM1 targeting guide sequence portion
ucgaggacaaacucauccaga

SEQ ID NO: 11026 - RNA, 21 nt, Artificial Sequence
  SARM1 targeting guide sequence portion
ucuccacaucaaugaagacac

SEQ ID NO: 11027 - RNA, 21 nt, Artificial Sequence
  SARM1 targeting guide sequence portion
ucuccugaaggugcaccugca

SEQ ID NO: 11028 - RNA, 21 nt, Artificial Sequence
  SARM1 targeting guide sequence portion
ucuggaugaguuuguccucga

SEQ ID NO: 11029 - RNA, 21 nt, Artificial Sequence
  SARM1 targeting guide sequence portion
ucuucauugauguggagaagc

SEQ ID NO: 11030 - RNA, 21 nt, Artificial Sequence
  SARM1 targeting guide sequence portion
ucuugcaugcacuuguccagu

SEQ ID NO: 11031 - RNA, 21 nt, Artificial Sequence
  SARM1 targeting guide sequence portion
ugaagacacugaagccaugca

SEQ ID NO: 11032 - RNA, 21 nt, Artificial Sequence
  SARM1 targeting guide sequence portion
ugaagccaugcagcugcaggu

SEQ ID NO: 11033 - RNA, 21 nt, Artificial Sequence
  SARM1 targeting guide sequence portion
ugaaggugcaccugcagcugc

SEQ ID NO: 11034 - RNA, 21 nt, Artificial Sequence
  SARM1 targeting guide sequence portion
ugacacucuggaugaguuugu

SEQ ID NO: 11035 - RNA, 21 nt, Artificial Sequence
  SARM1 targeting guide sequence portion
ugacugcaaggauugggugca

SEQ ID NO: 11036 - RNA, 21 nt, Artificial Sequence
  SARM1 targeting guide sequence portion
ugaguuuguccucgaacuugc

SEQ ID NO: 11037 - RNA, 21 nt, Artificial Sequence
  SARM1 targeting guide sequence portion
ugauagcaccaacacaaaguu

SEQ ID NO: 11038 - RNA, 21 nt, Artificial Sequence
  SARM1 targeting guide sequence portion
ugauguggagaagcuggaagc

SEQ ID NO: 11039 - RNA, 21 nt, Artificial Sequence
  SARM1 targeting guide sequence portion
ugcaagaccaugacugcaagg

SEQ ID NO: 11040 - RNA, 21 nt, Artificial Sequence
  SARM1 targeting guide sequence portion
ugcaaggauugggugcauaag

SEQ ID NO: 11041 - RNA, 21 nt, Artificial Sequence
  SARM1 targeting guide sequence portion
ugcacccaauccuugcaguca

SEQ ID NO: 11042 - RNA, 21 nt, Artificial Sequence
  SARM1 targeting guide sequence portion
ugcaccugcagcugcauggcu

SEQ ID NO: 11043 - RNA, 21 nt, Artificial Sequence
  SARM1 targeting guide sequence portion
ugcacuuguccagugcuccag

SEQ ID NO: 11044 - RNA, 21 nt, Artificial Sequence
  SARM1 targeting guide sequence portion
ugcagcugcaggugcaccuuc

SEQ ID NO: 11045 - RNA, 21 nt, Artificial Sequence
  SARM1 targeting guide sequence portion
ugcagcugcauggcuucagug

SEQ ID NO: 11046 - RNA, 21 nt, Artificial Sequence
  SARM1 targeting guide sequence portion
ugcaggugcaccuucaggaga

SEQ ID NO: 11047 - RNA, 21 nt, Artificial Sequence
  SARM1 targeting guide sequence portion
ugcagucauggucuugcaugc

SEQ ID NO: 11048 - RNA, 21 nt, Artificial Sequence
  SARM1 targeting guide sequence portion
ugcagucuccugaaggugcac

SEQ ID NO: 11049 - RNA, 21 nt, Artificial Sequence
  SARM1 targeting guide sequence portion
ugcaugcaagaccaugacugc

SEQ ID NO: 11050 - RNA, 21 nt, Artificial Sequence
  SARM1 targeting guide sequence portion
ugcaugcacuuguccagugcu

SEQ ID NO: 11051 - RNA, 21 nt, Artificial Sequence
  SARM1 targeting guide sequence portion
ugcauggcuucagugucuuca

SEQ ID NO: 11052 - RNA, 21 nt, Artificial Sequence
  SARM1 targeting guide sequence portion
ugcccgcaacuuuguguuggu

SEQ ID NO: 11053 - RNA, 21 nt, Artificial Sequence
  SARM1 targeting guide sequence portion
ugccugcuuccagcuucucca

SEQ ID NO: 11054 - RNA, 21 nt, Artificial Sequence
  SARM1 targeting guide sequence portion
ugcgggcacccaugacacucu

SEQ ID NO: 11055 - RNA, 21 nt, Artificial Sequence
  SARM1 targeting guide sequence portion
ugcuaucaccuggagcacugg

SEQ ID NO: 11056 - RNA, 21 nt, Artificial Sequence
  SARM1 targeting guide sequence portion
ugcuccaggugauagcaccaa

SEQ ID NO: 11057 - RNA, 21 nt, Artificial Sequence
  SARM1 targeting guide sequence portion
ugcuuccagcuucuccacauc

SEQ ID NO: 11058 - RNA, 21 nt, Artificial Sequence
  SARM1 targeting guide sequence portion
uggaagcaggcaaguucgagg

SEQ ID NO: 11059 - RNA, 21 nt, Artificial Sequence
  SARM1 targeting guide sequence portion
uggacaagugcaugcaagacc

SEQ ID NO: 11060 - RNA, 21 nt, Artificial Sequence
  SARM1 targeting guide sequence portion
uggagaagcuggaagcaggca

SEQ ID NO: 11061 - RNA, 21 nt, Artificial Sequence
  SARM1 targeting guide sequence portion
uggagcacuggacaagugcau

SEQ ID NO: 11062 - RNA, 21 nt, Artificial Sequence
  SARM1 targeting guide sequence portion
uggaugaguuuguccucgaac

SEQ ID NO: 11063 - RNA, 21 nt, Artificial Sequence
  SARM1 targeting guide sequence portion
uggcuucagugucuucauuga

SEQ ID NO: 11064 - RNA, 21 nt, Artificial Sequence
  SARM1 targeting guide sequence portion
ugggugcccgcaacuuugugu

SEQ ID NO: 11065 - RNA, 21 nt, Artificial Sequence
  SARM1 targeting guide sequence portion
uggucuugcaugcacuugucc

SEQ ID NO: 11066 - RNA, 21 nt, Artificial Sequence
  SARM1 targeting guide sequence portion
uggugcuaucaccuggagcac

SEQ ID NO: 11067 - RNA, 21 nt, Artificial Sequence
  SARM1 targeting guide sequence portion
ugucaugggugcccgcaacuu

SEQ ID NO: 11068 - RNA, 21 nt, Artificial Sequence
  SARM1 targeting guide sequence portion
uguccagugcuccaggugaua

SEQ ID NO: 11069 - RNA, 21 nt, Artificial Sequence
  SARM1 targeting guide sequence portion
uguccucgaacuugccugcuu

SEQ ID NO: 11070 - RNA, 21 nt, Artificial Sequence
  SARM1 targeting guide sequence portion
ugucuucauugauguggagaa

SEQ ID NO: 11071 - RNA, 21 nt, Artificial Sequence
  SARM1 targeting guide sequence portion
uguggagaagcuggaagcagg

SEQ ID NO: 11072 - RNA, 21 nt, Artificial Sequence
  SARM1 targeting guide sequence portion
uguguuggugcuaucaccugg

SEQ ID NO: 11073 - RNA, 21 nt, Artificial Sequence
  SARM1 targeting guide sequence portion
uguuggugcuaucaccuggag

SEQ ID NO: 11074 - RNA, 21 nt, Artificial Sequence
  SARM1 targeting guide sequence portion
uuaugcacccaauccuugcag

SEQ ID NO: 11075 - RNA, 21 nt, Artificial Sequence
  SARM1 targeting guide sequence portion
uucagugucuucauugaugug

SEQ ID NO: 11076 - RNA, 21 nt, Artificial Sequence
  SARM1 targeting guide sequence portion
uucauugauguggagaagcug

SEQ ID NO: 11077 - RNA, 21 nt, Artificial Sequence
  SARM1 targeting guide sequence portion
uuccagcuucuccacaucaau

SEQ ID NO: 11078 - RNA, 21 nt, Artificial Sequence
  SARM1 targeting guide sequence portion
uucgaggacaaacucauccag

SEQ ID NO: 11079 - RNA, 21 nt, Artificial Sequence
  SARM1 targeting guide sequence portion
uucuccacaucaaugaagaca

SEQ ID NO: 11080 - RNA, 21 nt, Artificial Sequence
  SARM1 targeting guide sequence portion
uugauguggagaagcuggaag

SEQ ID NO: 11081 - RNA, 21 nt, Artificial Sequence
  SARM1 targeting guide sequence portion
uugcagucauggucuugcaug

SEQ ID NO: 11082 - RNA, 21 nt, Artificial Sequence
  SARM1 targeting guide sequence portion
uugcagucuccugaaggugca

SEQ ID NO: 11083 - RNA, 21 nt, Artificial Sequence
  SARM1 targeting guide sequence portion
uugcaugcacuuguccagugc

SEQ ID NO: 11084 - RNA, 21 nt, Artificial Sequence
  SARM1 targeting guide sequence portion
uugccugcuuccagcuucucc

SEQ ID NO: 11085 - RNA, 21 nt, Artificial Sequence
  SARM1 targeting guide sequence portion
uugcgggcacccaugacacuc

SEQ ID NO: 11086 - RNA, 21 nt, Artificial Sequence
  SARM1 targeting guide sequence portion
uuggugcuaucaccuggagca

SEQ ID NO: 11087 - RNA, 21 nt, Artificial Sequence
  SARM1 targeting guide sequence portion
uuguccagugcuccaggugau

SEQ ID NO: 11088 - RNA, 21 nt, Artificial Sequence
  SARM1 targeting guide sequence portion
uuguccucgaacuugccugcu

SEQ ID NO: 11089 - RNA, 21 nt, Artificial Sequence
  SARM1 targeting guide sequence portion
uuguguuggugcuaucaccug

SEQ ID NO: 11090 - RNA, 21 nt, Artificial Sequence
  SARM1 targeting guide sequence portion
uuuguccucgaacuugccugc

SEQ ID NO: 11091 - RNA, 21 nt, Artificial Sequence
  SARM1 targeting guide sequence portion
uuuguguuggugcuaucaccu

SEQ ID NO: 11092 - RNA, 22 nt, Artificial Sequence
  SARM1 targeting guide sequence portion
aaacucauccagagugucaugg

SEQ ID NO: 11093 - RNA, 22 nt, Artificial Sequence
  SARM1 targeting guide sequence portion
aaaguugcgggcacccaugaca

SEQ ID NO: 11094 - RNA, 22 nt, Artificial Sequence
  SARM1 targeting guide sequence portion
aacacaaaguugcgggcaccca

SEQ ID NO: 11095 - RNA, 22 nt, Artificial Sequence
  SARM1 targeting guide sequence portion
aacucauccagagugucauggg

SEQ ID NO: 11096 - RNA, 22 nt, Artificial Sequence
  SARM1 targeting guide sequence portion
aacuugccugcuuccagcuucu

SEQ ID NO: 11097 - RNA, 22 nt, Artificial Sequence
  SARM1 targeting guide sequence portion
aacuuuguguuggugcuaucac

SEQ ID NO: 11098 - RNA, 22 nt, Artificial Sequence
  SARM1 targeting guide sequence portion
aagacacugaagccaugcagcu

SEQ ID NO: 11099 - RNA, 22 nt, Artificial Sequence
  SARM1 targeting guide sequence portion
aagaccaugacugcaaggauug

SEQ ID NO: 11100 - RNA, 22 nt, Artificial Sequence
  SARM1 targeting guide sequence portion
aagcaggcaaguucgaggacaa

SEQ ID NO: 11101 - RNA, 22 nt, Artificial Sequence
  SARM1 targeting guide sequence portion
aagccaugcagcugcaggugca

SEQ ID NO: 11102 - RNA, 22 nt, Artificial Sequence
  SARM1 targeting guide sequence portion
aagcuggaagcaggcaaguucg

SEQ ID NO: 11103 - RNA, 22 nt, Artificial Sequence
  SARM1 targeting guide sequence portion
aaggugcaccugcagcugcaug

SEQ ID NO: 11104 - RNA, 22 nt, Artificial Sequence
  SARM1 targeting guide sequence portion
aagugcaugcaagaccaugacu

SEQ ID NO: 11105 - RNA, 22 nt, Artificial Sequence
  SARM1 targeting guide sequence portion
aaguucgaggacaaacucaucc

SEQ ID NO: 11106 - RNA, 22 nt, Artificial Sequence
  SARM1 targeting guide sequence portion
aaguugcgggcacccaugacac

SEQ ID NO: 11107 - RNA, 22 nt, Artificial Sequence
  SARM1 targeting guide sequence portion
aauccuugcagucauggucuug

SEQ ID NO: 11108 - RNA, 22 nt, Artificial Sequence
  SARM1 targeting guide sequence portion
aaugaagacacugaagccaugc

SEQ ID NO: 11109 - RNA, 22 nt, Artificial Sequence
  SARM1 targeting guide sequence portion
acaaacucauccagagugucau

SEQ ID NO: 11110 - RNA, 22 nt, Artificial Sequence
  SARM1 targeting guide sequence portion
acaaaguugcgggcacccauga

SEQ ID NO: 11111 - RNA, 22 nt, Artificial Sequence
  SARM1 targeting guide sequence portion
acaagugcaugcaagaccauga

SEQ ID NO: 11112 - RNA, 22 nt, Artificial Sequence
  SARM1 targeting guide sequence portion
acacaaaguugcgggcacccau

SEQ ID NO: 11113 - RNA, 22 nt, Artificial Sequence
  SARM1 targeting guide sequence portion
acacucuggaugaguuuguccu

SEQ ID NO: 11114 - RNA, 22 nt, Artificial Sequence
  SARM1 targeting guide sequence portion
acacugaagccaugcagcugca

SEQ ID NO: 11115 - RNA, 22 nt, Artificial Sequence
  SARM1 targeting guide sequence portion
acaucaaugaagacacugaagc

SEQ ID NO: 11116 - RNA, 22 nt, Artificial Sequence
  SARM1 targeting guide sequence portion
accaacacaaaguugcgggcac

SEQ ID NO: 11117 - RNA, 22 nt, Artificial Sequence
  SARM1 targeting guide sequence portion
accaugacugcaaggauugggu

SEQ ID NO: 11118 - RNA, 22 nt, Artificial Sequence
  SARM1 targeting guide sequence portion
acccaauccuugcagucauggu

SEQ ID NO: 11119 - RNA, 22 nt, Artificial Sequence
  SARM1 targeting guide sequence portion
acccaugacacucuggaugagu

SEQ ID NO: 11120 - RNA, 22 nt, Artificial Sequence
  SARM1 targeting guide sequence portion
accuaccuuaugcacccaaucc

SEQ ID NO: 11121 - RNA, 22 nt, Artificial Sequence
  SARM1 targeting guide sequence portion
accugcagcugcauggcuucag

SEQ ID NO: 11122 - RNA, 22 nt, Artificial Sequence
  SARM1 targeting guide sequence portion
accuggagcacuggacaagugc

SEQ ID NO: 11123 - RNA, 22 nt, Artificial Sequence
  SARM1 targeting guide sequence portion
accuuaugcacccaauccuugc

SEQ ID NO: 11124 - RNA, 22 nt, Artificial Sequence
  SARM1 targeting guide sequence portion
acucauccagagugucaugggu

SEQ ID NO: 11125 - RNA, 22 nt, Artificial Sequence
  SARM1 targeting guide sequence portion
acucuggaugaguuuguccucg

SEQ ID NO: 11126 - RNA, 22 nt, Artificial Sequence
  SARM1 targeting guide sequence portion
acugaagccaugcagcugcagg

SEQ ID NO: 11127 - RNA, 22 nt, Artificial Sequence
  SARM1 targeting guide sequence portion
acugcaaggauugggugcauaa

SEQ ID NO: 11128 - RNA, 22 nt, Artificial Sequence
  SARM1 targeting guide sequence portion
acuggacaagugcaugcaagac

SEQ ID NO: 11129 - RNA, 22 nt, Artificial Sequence
  SARM1 targeting guide sequence portion
acuugccugcuuccagcuucuc

SEQ ID NO: 11130 - RNA, 22 nt, Artificial Sequence
  SARM1 targeting guide sequence portion
acuuguccagugcuccagguga

SEQ ID NO: 11131 - RNA, 22 nt, Artificial Sequence
  SARM1 targeting guide sequence portion
acuuuguguuggugcuaucacc

SEQ ID NO: 11132 - RNA, 22 nt, Artificial Sequence
  SARM1 targeting guide sequence portion
agaagcuggaagcaggcaaguu

SEQ ID NO: 11133 - RNA, 22 nt, Artificial Sequence
  SARM1 targeting guide sequence portion
agacacugaagccaugcagcug

SEQ ID NO: 11134 - RNA, 22 nt, Artificial Sequence
  SARM1 targeting guide sequence portion
agaccaugacugcaaggauugg

SEQ ID NO: 11135 - RNA, 22 nt, Artificial Sequence
  SARM1 targeting guide sequence portion
agagugucaugggugcccgcaa

SEQ ID NO: 11136 - RNA, 22 nt, Artificial Sequence
  SARM1 targeting guide sequence portion
agcaccaacacaaaguugcggg

SEQ ID NO: 11137 - RNA, 22 nt, Artificial Sequence
  SARM1 targeting guide sequence portion
agcacuggacaagugcaugcaa

SEQ ID NO: 11138 - RNA, 22 nt, Artificial Sequence
  SARM1 targeting guide sequence portion
agcaggcaaguucgaggacaaa

SEQ ID NO: 11139 - RNA, 22 nt, Artificial Sequence
  SARM1 targeting guide sequence portion
agccaugcagcugcaggugcac

SEQ ID NO: 11140 - RNA, 22 nt, Artificial Sequence
  SARM1 targeting guide sequence portion
agcugcaggugcaccuucagga

SEQ ID NO: 11141 - RNA, 22 nt, Artificial Sequence
  SARM1 targeting guide sequence portion
agcugcauggcuucagugucuu

SEQ ID NO: 11142 - RNA, 22 nt, Artificial Sequence
  SARM1 targeting guide sequence portion
agcuggaagcaggcaaguucga

SEQ ID NO: 11143 - RNA, 22 nt, Artificial Sequence
  SARM1 targeting guide sequence portion
agcuucuccacaucaaugaaga

SEQ ID NO: 11144 - RNA, 22 nt, Artificial Sequence
  SARM1 targeting guide sequence portion
aggacaaacucauccagagugu

SEQ ID NO: 11145 - RNA, 22 nt, Artificial Sequence
  SARM1 targeting guide sequence portion
aggcaaguucgaggacaaacuc

SEQ ID NO: 11146 - RNA, 22 nt, Artificial Sequence
  SARM1 targeting guide sequence portion
aggugauagcaccaacacaaag

SEQ ID NO: 11147 - RNA, 22 nt, Artificial Sequence
  SARM1 targeting guide sequence portion
aggugcaccugcagcugcaugg

SEQ ID NO: 11148 - RNA, 22 nt, Artificial Sequence
  SARM1 targeting guide sequence portion
agucauggucuugcaugcacuu

SEQ ID NO: 11149 - RNA, 22 nt, Artificial Sequence
  SARM1 targeting guide sequence portion
agucuccugaaggugcaccugc

SEQ ID NO: 11150 - RNA, 22 nt, Artificial Sequence
  SARM1 targeting guide sequence portion
agugcaugcaagaccaugacug

SEQ ID NO: 11151 - RNA, 22 nt, Artificial Sequence
  SARM1 targeting guide sequence portion
agugcuccaggugauagcacca

SEQ ID NO: 11152 - RNA, 22 nt, Artificial Sequence
  SARM1 targeting guide sequence portion
agugucaugggugcccgcaacu

SEQ ID NO: 11153 - RNA, 22 nt, Artificial Sequence
  SARM1 targeting guide sequence portion
agugucuucauugauguggaga

SEQ ID NO: 11154 - RNA, 22 nt, Artificial Sequence
  SARM1 targeting guide sequence portion
aguucgaggacaaacucaucca

SEQ ID NO: 11155 - RNA, 22 nt, Artificial Sequence
  SARM1 targeting guide sequence portion
aguugcgggcacccaugacacu

SEQ ID NO: 11156 - RNA, 22 nt, Artificial Sequence
  SARM1 targeting guide sequence portion
aguuuguccucgaacuugccug

SEQ ID NO: 11157 - RNA, 22 nt, Artificial Sequence
  SARM1 targeting guide sequence portion
auagcaccaacacaaaguugcg

SEQ ID NO: 11158 - RNA, 22 nt, Artificial Sequence
  SARM1 targeting guide sequence portion
aucaaugaagacacugaagcca

SEQ ID NO: 11159 - RNA, 22 nt, Artificial Sequence
  SARM1 targeting guide sequence portion
aucaccuggagcacuggacaag

SEQ ID NO: 11160 - RNA, 22 nt, Artificial Sequence
  SARM1 targeting guide sequence portion
auccagagugucaugggugccc

SEQ ID NO: 11161 - RNA, 22 nt, Artificial Sequence
  SARM1 targeting guide sequence portion
auccuugcagucauggucuugc

SEQ ID NO: 11162 - RNA, 22 nt, Artificial Sequence
  SARM1 targeting guide sequence portion
augaagacacugaagccaugca

SEQ ID NO: 11163 - RNA, 22 nt, Artificial Sequence
  SARM1 targeting guide sequence portion
augacacucuggaugaguuugu

SEQ ID NO: 11164 - RNA, 22 nt, Artificial Sequence
  SARM1 targeting guide sequence portion
augacugcaaggauugggugca

SEQ ID NO: 11165 - RNA, 22 nt, Artificial Sequence
  SARM1 targeting guide sequence portion
augaguuuguccucgaacuugc

SEQ ID NO: 11166 - RNA, 22 nt, Artificial Sequence
  SARM1 targeting guide sequence portion
augcaagaccaugacugcaagg

SEQ ID NO: 11167 - RNA, 22 nt, Artificial Sequence
  SARM1 targeting guide sequence portion
augcacccaauccuugcaguca

SEQ ID NO: 11168 - RNA, 22 nt, Artificial Sequence
  SARM1 targeting guide sequence portion
augcacuuguccagugcuccag

SEQ ID NO: 11169 - RNA, 22 nt, Artificial Sequence
  SARM1 targeting guide sequence portion
augcagcugcaggugcaccuuc

SEQ ID NO: 11170 - RNA, 22 nt, Artificial Sequence
  SARM1 targeting guide sequence portion
auggcuucagugucuucauuga

SEQ ID NO: 11171 - RNA, 22 nt, Artificial Sequence
  SARM1 targeting guide sequence portion
augggugcccgcaacuuugugu

SEQ ID NO: 11172 - RNA, 22 nt, Artificial Sequence
  SARM1 targeting guide sequence portion
auggucuugcaugcacuugucc

SEQ ID NO: 11173 - RNA, 22 nt, Artificial Sequence
  SARM1 targeting guide sequence portion
auguggagaagcuggaagcagg

SEQ ID NO: 11174 - RNA, 22 nt, Artificial Sequence
  SARM1 targeting guide sequence portion
auugauguggagaagcuggaag

SEQ ID NO: 11175 - RNA, 22 nt, Artificial Sequence
  SARM1 targeting guide sequence portion
caaacucauccagagugucaug

SEQ ID NO: 11176 - RNA, 22 nt, Artificial Sequence
  SARM1 targeting guide sequence portion
caaaguugcgggcacccaugac

SEQ ID NO: 11177 - RNA, 22 nt, Artificial Sequence
  SARM1 targeting guide sequence portion
caacacaaaguugcgggcaccc

SEQ ID NO: 11178 - RNA, 22 nt, Artificial Sequence
  SARM1 targeting guide sequence portion
caacuuuguguuggugcuauca

SEQ ID NO: 11179 - RNA, 22 nt, Artificial Sequence
  SARM1 targeting guide sequence portion
caagaccaugacugcaaggauu

SEQ ID NO: 11180 - RNA, 22 nt, Artificial Sequence
  SARM1 targeting guide sequence portion
caagugcaugcaagaccaugac

SEQ ID NO: 11181 - RNA, 22 nt, Artificial Sequence
  SARM1 targeting guide sequence portion
caaguucgaggacaaacucauc

SEQ ID NO: 11182 - RNA, 22 nt, Artificial Sequence
  SARM1 targeting guide sequence portion
caauccuugcagucauggucuu

SEQ ID NO: 11183 - RNA, 22 nt, Artificial Sequence
  SARM1 targeting guide sequence portion
caaugaagacacugaagccaug

SEQ ID NO: 11184 - RNA, 22 nt, Artificial Sequence
  SARM1 targeting guide sequence portion
cacaaaguugcgggcacccaug

SEQ ID NO: 11185 - RNA, 22 nt, Artificial Sequence
  SARM1 targeting guide sequence portion
cacaucaaugaagacacugaag

SEQ ID NO: 11186 - RNA, 22 nt, Artificial Sequence
  SARM1 targeting guide sequence portion
caccaacacaaaguugcgggca

SEQ ID NO: 11187 - RNA, 22 nt, Artificial Sequence
  SARM1 targeting guide sequence portion
cacccaauccuugcagucaugg

SEQ ID NO: 11188 - RNA, 22 nt, Artificial Sequence
  SARM1 targeting guide sequence portion
cacccaugacacucuggaugag

SEQ ID NO: 11189 - RNA, 22 nt, Artificial Sequence
  SARM1 targeting guide sequence portion
caccuaccuuaugcacccaauc

SEQ ID NO: 11190 - RNA, 22 nt, Artificial Sequence
  SARM1 targeting guide sequence portion
caccugcagcugcauggcuuca

SEQ ID NO: 11191 - RNA, 22 nt, Artificial Sequence
  SARM1 targeting guide sequence portion
caccuggagcacuggacaagug

SEQ ID NO: 11192 - RNA, 22 nt, Artificial Sequence
  SARM1 targeting guide sequence portion
cacucuggaugaguuuguccuc

SEQ ID NO: 11193 - RNA, 22 nt, Artificial Sequence
  SARM1 targeting guide sequence portion
cacugaagccaugcagcugcag

SEQ ID NO: 11194 - RNA, 22 nt, Artificial Sequence
  SARM1 targeting guide sequence portion
cacuggacaagugcaugcaaga

SEQ ID NO: 11195 - RNA, 22 nt, Artificial Sequence
  SARM1 targeting guide sequence portion
cacuuguccagugcuccaggug

SEQ ID NO: 11196 - RNA, 22 nt, Artificial Sequence
  SARM1 targeting guide sequence portion
cagagugucaugggugcccgca

SEQ ID NO: 11197 - RNA, 22 nt, Artificial Sequence
  SARM1 targeting guide sequence portion
cagcugcaggugcaccuucagg

SEQ ID NO: 11198 - RNA, 22 nt, Artificial Sequence
  SARM1 targeting guide sequence portion
cagcugcauggcuucagugucu

SEQ ID NO: 11199 - RNA, 22 nt, Artificial Sequence
  SARM1 targeting guide sequence portion
cagcuucuccacaucaaugaag

SEQ ID NO: 11200 - RNA, 22 nt, Artificial Sequence
  SARM1 targeting guide sequence portion
caggcaaguucgaggacaaacu

SEQ ID NO: 11201 - RNA, 22 nt, Artificial Sequence
  SARM1 targeting guide sequence portion
caggugauagcaccaacacaaa

SEQ ID NO: 11202 - RNA, 22 nt, Artificial Sequence
  SARM1 targeting guide sequence portion
cagucauggucuugcaugcacu

SEQ ID NO: 11203 - RNA, 22 nt, Artificial Sequence
  SARM1 targeting guide sequence portion
cagucuccugaaggugcaccug

SEQ ID NO: 11204 - RNA, 22 nt, Artificial Sequence
  SARM1 targeting guide sequence portion
cagugcuccaggugauagcacc

SEQ ID NO: 11205 - RNA, 22 nt, Artificial Sequence
  SARM1 targeting guide sequence portion
cagugucuucauugauguggag

SEQ ID NO: 11206 - RNA, 22 nt, Artificial Sequence
  SARM1 targeting guide sequence portion
caucaaugaagacacugaagcc

SEQ ID NO: 11207 - RNA, 22 nt, Artificial Sequence
  SARM1 targeting guide sequence portion
cauccagagugucaugggugcc

SEQ ID NO: 11208 - RNA, 22 nt, Artificial Sequence
  SARM1 targeting guide sequence portion
caugacacucuggaugaguuug

SEQ ID NO: 11209 - RNA, 22 nt, Artificial Sequence
  SARM1 targeting guide sequence portion
caugacugcaaggauugggugc

SEQ ID NO: 11210 - RNA, 22 nt, Artificial Sequence
  SARM1 targeting guide sequence portion
caugcaagaccaugacugcaag

SEQ ID NO: 11211 - RNA, 22 nt, Artificial Sequence
  SARM1 targeting guide sequence portion
caugcacuuguccagugcucca

SEQ ID NO: 11212 - RNA, 22 nt, Artificial Sequence
  SARM1 targeting guide sequence portion
caugcagcugcaggugcaccuu

SEQ ID NO: 11213 - RNA, 22 nt, Artificial Sequence
  SARM1 targeting guide sequence portion
cauggcuucagugucuucauug

SEQ ID NO: 11214 - RNA, 22 nt, Artificial Sequence
  SARM1 targeting guide sequence portion
caugggugcccgcaacuuugug

SEQ ID NO: 11215 - RNA, 22 nt, Artificial Sequence
  SARM1 targeting guide sequence portion
cauggucuugcaugcacuuguc

SEQ ID NO: 11216 - RNA, 22 nt, Artificial Sequence
  SARM1 targeting guide sequence portion
cauugauguggagaagcuggaa

SEQ ID NO: 11217 - RNA, 22 nt, Artificial Sequence
  SARM1 targeting guide sequence portion
ccaacacaaaguugcgggcacc

SEQ ID NO: 11218 - RNA, 22 nt, Artificial Sequence
  SARM1 targeting guide sequence portion
ccaauccuugcagucauggucu

SEQ ID NO: 11219 - RNA, 22 nt, Artificial Sequence
  SARM1 targeting guide sequence portion
ccacaucaaugaagacacugaa

SEQ ID NO: 11220 - RNA, 22 nt, Artificial Sequence
  SARM1 targeting guide sequence portion
ccagagugucaugggugcccgc

SEQ ID NO: 11221 - RNA, 22 nt, Artificial Sequence
  SARM1 targeting guide sequence portion
ccagcuucuccacaucaaugaa

SEQ ID NO: 11222 - RNA, 22 nt, Artificial Sequence
  SARM1 targeting guide sequence portion
ccaggugauagcaccaacacaa

SEQ ID NO: 11223 - RNA, 22 nt, Artificial Sequence
  SARM1 targeting guide sequence portion
ccagugcuccaggugauagcac

SEQ ID NO: 11224 - RNA, 22 nt, Artificial Sequence
  SARM1 targeting guide sequence portion
ccaugacacucuggaugaguuu

SEQ ID NO: 11225 - RNA, 22 nt, Artificial Sequence
  SARM1 targeting guide sequence portion
ccaugacugcaaggauugggug

SEQ ID NO: 11226 - RNA, 22 nt, Artificial Sequence
  SARM1 targeting guide sequence portion
ccaugcagcugcaggugcaccu

SEQ ID NO: 11227 - RNA, 22 nt, Artificial Sequence
  SARM1 targeting guide sequence portion
cccaauccuugcagucaugguc

SEQ ID NO: 11228 - RNA, 22 nt, Artificial Sequence
  SARM1 targeting guide sequence portion
cccaugacacucuggaugaguu

SEQ ID NO: 11229 - RNA, 22 nt, Artificial Sequence
  SARM1 targeting guide sequence portion
cccgcaacuuuguguuggugcu

SEQ ID NO: 11230 - RNA, 22 nt, Artificial Sequence
  SARM1 targeting guide sequence portion
ccgcaacuuuguguuggugcua

SEQ ID NO: 11231 - RNA, 22 nt, Artificial Sequence
  SARM1 targeting guide sequence portion
ccuaccuuaugcacccaauccu

SEQ ID NO: 11232 - RNA, 22 nt, Artificial Sequence
  SARM1 targeting guide sequence portion
ccucgaacuugccugcuuccag

SEQ ID NO: 11233 - RNA, 22 nt, Artificial Sequence
  SARM1 targeting guide sequence portion
ccugaaggugcaccugcagcug

SEQ ID NO: 11234 - RNA, 22 nt, Artificial Sequence
  SARM1 targeting guide sequence portion
ccugcagcugcauggcuucagu

SEQ ID NO: 11235 - RNA, 22 nt, Artificial Sequence
  SARM1 targeting guide sequence portion
ccugcuuccagcuucuccacau

SEQ ID NO: 11236 - RNA, 22 nt, Artificial Sequence
  SARM1 targeting guide sequence portion
ccuggagcacuggacaagugca

SEQ ID NO: 11237 - RNA, 22 nt, Artificial Sequence
  SARM1 targeting guide sequence portion
ccuuaugcacccaauccuugca

SEQ ID NO: 11238 - RNA, 22 nt, Artificial Sequence
  SARM1 targeting guide sequence portion
ccuugcagucauggucuugcau

SEQ ID NO: 11239 - RNA, 22 nt, Artificial Sequence
  SARM1 targeting guide sequence portion
cgaacuugccugcuuccagcuu

SEQ ID NO: 11240 - RNA, 22 nt, Artificial Sequence
  SARM1 targeting guide sequence portion
cgaggacaaacucauccagagu

SEQ ID NO: 11241 - RNA, 22 nt, Artificial Sequence
  SARM1 targeting guide sequence portion
cgcaacuuuguguuggugcuau

SEQ ID NO: 11242 - RNA, 22 nt, Artificial Sequence
  SARM1 targeting guide sequence portion
cgggcacccaugacacucugga

SEQ ID NO: 11243 - RNA, 22 nt, Artificial Sequence
  SARM1 targeting guide sequence portion
cuaccuuaugcacccaauccuu

SEQ ID NO: 11244 - RNA, 22 nt, Artificial Sequence
  SARM1 targeting guide sequence portion
cuaucaccuggagcacuggaca

SEQ ID NO: 11245 - RNA, 22 nt, Artificial Sequence
  SARM1 targeting guide sequence portion
cucauccagagugucaugggug

SEQ ID NO: 11246 - RNA, 22 nt, Artificial Sequence
  SARM1 targeting guide sequence portion
cuccacaucaaugaagacacug

SEQ ID NO: 11247 - RNA, 22 nt, Artificial Sequence
  SARM1 targeting guide sequence portion
cuccaggugauagcaccaacac

SEQ ID NO: 11248 - RNA, 22 nt, Artificial Sequence
  SARM1 targeting guide sequence portion
cuccugaaggugcaccugcagc

SEQ ID NO: 11249 - RNA, 22 nt, Artificial Sequence
  SARM1 targeting guide sequence portion
cucgaacuugccugcuuccagc

SEQ ID NO: 11250 - RNA, 22 nt, Artificial Sequence
  SARM1 targeting guide sequence portion
cucuggaugaguuuguccucga

SEQ ID NO: 11251 - RNA, 22 nt, Artificial Sequence
  SARM1 targeting guide sequence portion
cugaagccaugcagcugcaggu

SEQ ID NO: 11252 - RNA, 22 nt, Artificial Sequence
  SARM1 targeting guide sequence portion
cugaaggugcaccugcagcugc

SEQ ID NO: 11253 - RNA, 22 nt, Artificial Sequence
  SARM1 targeting guide sequence portion
cugcaaggauugggugcauaag

SEQ ID NO: 11254 - RNA, 22 nt, Artificial Sequence
  SARM1 targeting guide sequence portion
cugcagcugcauggcuucagug

SEQ ID NO: 11255 - RNA, 22 nt, Artificial Sequence
  SARM1 targeting guide sequence portion
cugcaggugcaccuucaggaga

SEQ ID NO: 11256 - RNA, 22 nt, Artificial Sequence
  SARM1 targeting guide sequence portion
cugcauggcuucagugucuuca

SEQ ID NO: 11257 - RNA, 22 nt, Artificial Sequence
  SARM1 targeting guide sequence portion
cugcuuccagcuucuccacauc

SEQ ID NO: 11258 - RNA, 22 nt, Artificial Sequence
  SARM1 targeting guide sequence portion
cuggaagcaggcaaguucgagg

SEQ ID NO: 11259 - RNA, 22 nt, Artificial Sequence
  SARM1 targeting guide sequence portion
cuggacaagugcaugcaagacc

SEQ ID NO: 11260 - RNA, 22 nt, Artificial Sequence
  SARM1 targeting guide sequence portion
cuggagcacuggacaagugcau

SEQ ID NO: 11261 - RNA, 22 nt, Artificial Sequence
  SARM1 targeting guide sequence portion
cuggaugaguuuguccucgaac

SEQ ID NO: 11262 - RNA, 22 nt, Artificial Sequence
  SARM1 targeting guide sequence portion
cuuaugcacccaauccuugcag

SEQ ID NO: 11263 - RNA, 22 nt, Artificial Sequence
  SARM1 targeting guide sequence portion
cuucagugucuucauugaugug

SEQ ID NO: 11264 - RNA, 22 nt, Artificial Sequence
  SARM1 targeting guide sequence portion
cuucauugauguggagaagcug

SEQ ID NO: 11265 - RNA, 22 nt, Artificial Sequence
  SARM1 targeting guide sequence portion
cuuccagcuucuccacaucaau

SEQ ID NO: 11266 - RNA, 22 nt, Artificial Sequence
  SARM1 targeting guide sequence portion
cuucuccacaucaaugaagaca

SEQ ID NO: 11267 - RNA, 22 nt, Artificial Sequence
  SARM1 targeting guide sequence portion
cuugcagucauggucuugcaug

SEQ ID NO: 11268 - RNA, 22 nt, Artificial Sequence
  SARM1 targeting guide sequence portion
cuugcagucuccugaaggugca

SEQ ID NO: 11269 - RNA, 22 nt, Artificial Sequence
  SARM1 targeting guide sequence portion
cuugcaugcacuuguccagugc

SEQ ID NO: 11270 - RNA, 22 nt, Artificial Sequence
  SARM1 targeting guide sequence portion
cuugccugcuuccagcuucucc

SEQ ID NO: 11271 - RNA, 22 nt, Artificial Sequence
  SARM1 targeting guide sequence portion
cuuguccagugcuccaggugau

SEQ ID NO: 11272 - RNA, 22 nt, Artificial Sequence
  SARM1 targeting guide sequence portion
cuuuguguuggugcuaucaccu

SEQ ID NO: 11273 - RNA, 22 nt, Artificial Sequence
  SARM1 targeting guide sequence portion
gaacuugccugcuuccagcuuc

SEQ ID NO: 11274 - RNA, 22 nt, Artificial Sequence
  SARM1 targeting guide sequence portion
gaagacacugaagccaugcagc

SEQ ID NO: 11275 - RNA, 22 nt, Artificial Sequence
  SARM1 targeting guide sequence portion
gaagcaggcaaguucgaggaca

SEQ ID NO: 11276 - RNA, 22 nt, Artificial Sequence
  SARM1 targeting guide sequence portion
gaagccaugcagcugcaggugc

SEQ ID NO: 11277 - RNA, 22 nt, Artificial Sequence
  SARM1 targeting guide sequence portion
gaagcuggaagcaggcaaguuc

SEQ ID NO: 11278 - RNA, 22 nt, Artificial Sequence
  SARM1 targeting guide sequence portion
gaaggugcaccugcagcugcau

SEQ ID NO: 11279 - RNA, 22 nt, Artificial Sequence
  SARM1 targeting guide sequence portion
gacaaacucauccagaguguca

SEQ ID NO: 11280 - RNA, 22 nt, Artificial Sequence
  SARM1 targeting guide sequence portion
gacaagugcaugcaagaccaug

SEQ ID NO: 11281 - RNA, 22 nt, Artificial Sequence
  SARM1 targeting guide sequence portion
gacacucuggaugaguuugucc

SEQ ID NO: 11282 - RNA, 22 nt, Artificial Sequence
  SARM1 targeting guide sequence portion
gacacugaagccaugcagcugc

SEQ ID NO: 11283 - RNA, 22 nt, Artificial Sequence
  SARM1 targeting guide sequence portion
gaccaugacugcaaggauuggg

SEQ ID NO: 11284 - RNA, 22 nt, Artificial Sequence
  SARM1 targeting guide sequence portion
gacugcaaggauugggugcaua

SEQ ID NO: 11285 - RNA, 22 nt, Artificial Sequence
  SARM1 targeting guide sequence portion
gagaagcuggaagcaggcaagu

SEQ ID NO: 11286 - RNA, 22 nt, Artificial Sequence
  SARM1 targeting guide sequence portion
gagcacuggacaagugcaugca

SEQ ID NO: 11287 - RNA, 22 nt, Artificial Sequence
  SARM1 targeting guide sequence portion
gaggacaaacucauccagagug

SEQ ID NO: 11288 - RNA, 22 nt, Artificial Sequence
  SARM1 targeting guide sequence portion
gagugucaugggugcccgcaac

SEQ ID NO: 11289 - RNA, 22 nt, Artificial Sequence
  SARM1 targeting guide sequence portion
gaguuuguccucgaacuugccu

SEQ ID NO: 11290 - RNA, 22 nt, Artificial Sequence
  SARM1 targeting guide sequence portion
gauagcaccaacacaaaguugc

SEQ ID NO: 11291 - RNA, 22 nt, Artificial Sequence
  SARM1 targeting guide sequence portion
gaugaguuuguccucgaacuug

SEQ ID NO: 11292 - RNA, 22 nt, Artificial Sequence
  SARM1 targeting guide sequence portion
gauguggagaagcuggaagcag

SEQ ID NO: 11293 - RNA, 22 nt, Artificial Sequence
  SARM1 targeting guide sequence portion
gcaacuuuguguuggugcuauc

SEQ ID NO: 11294 - RNA, 22 nt, Artificial Sequence
  SARM1 targeting guide sequence portion
gcaagaccaugacugcaaggau

SEQ ID NO: 11295 - RNA, 22 nt, Artificial Sequence
  SARM1 targeting guide sequence portion
gcaaguucgaggacaaacucau

SEQ ID NO: 11296 - RNA, 22 nt, Artificial Sequence
  SARM1 targeting guide sequence portion
gcaccaacacaaaguugcgggc

SEQ ID NO: 11297 - RNA, 22 nt, Artificial Sequence
  SARM1 targeting guide sequence portion
gcacccaauccuugcagucaug

SEQ ID NO: 11298 - RNA, 22 nt, Artificial Sequence
  SARM1 targeting guide sequence portion
gcacccaugacacucuggauga

SEQ ID NO: 11299 - RNA, 22 nt, Artificial Sequence
  SARM1 targeting guide sequence portion
gcaccugcagcugcauggcuuc

SEQ ID NO: 11300 - RNA, 22 nt, Artificial Sequence
  SARM1 targeting guide sequence portion
gcacuggacaagugcaugcaag

SEQ ID NO: 11301 - RNA, 22 nt, Artificial Sequence
  SARM1 targeting guide sequence portion
gcacuuguccagugcuccaggu

SEQ ID NO: 11302 - RNA, 22 nt, Artificial Sequence
  SARM1 targeting guide sequence portion
gcagcugcaggugcaccuucag

SEQ ID NO: 11303 - RNA, 22 nt, Artificial Sequence
  SARM1 targeting guide sequence portion
gcagcugcauggcuucaguguc

SEQ ID NO: 11304 - RNA, 22 nt, Artificial Sequence
  SARM1 targeting guide sequence portion
gcaggcaaguucgaggacaaac

SEQ ID NO: 11305 - RNA, 22 nt, Artificial Sequence
  SARM1 targeting guide sequence portion
gcagucauggucuugcaugcac

SEQ ID NO: 11306 - RNA, 22 nt, Artificial Sequence
  SARM1 targeting guide sequence portion
gcagucuccugaaggugcaccu

SEQ ID NO: 11307 - RNA, 22 nt, Artificial Sequence
  SARM1 targeting guide sequence portion
gcaugcaagaccaugacugcaa

SEQ ID NO: 11308 - RNA, 22 nt, Artificial Sequence
  SARM1 targeting guide sequence portion
gcaugcacuuguccagugcucc

SEQ ID NO: 11309 - RNA, 22 nt, Artificial Sequence
  SARM1 targeting guide sequence portion
gcauggcuucagugucuucauu

SEQ ID NO: 11310 - RNA, 22 nt, Artificial Sequence
  SARM1 targeting guide sequence portion
gccaugcagcugcaggugcacc

SEQ ID NO: 11311 - RNA, 22 nt, Artificial Sequence
  SARM1 targeting guide sequence portion
gcccgcaacuuuguguuggugc

SEQ ID NO: 11312 - RNA, 22 nt, Artificial Sequence
  SARM1 targeting guide sequence portion
gccugcuuccagcuucuccaca

SEQ ID NO: 11313 - RNA, 22 nt, Artificial Sequence
  SARM1 targeting guide sequence portion
gcgggcacccaugacacucugg

SEQ ID NO: 11314 - RNA, 22 nt, Artificial Sequence
  SARM1 targeting guide sequence portion
gcuaucaccuggagcacuggac

SEQ ID NO: 11315 - RNA, 22 nt, Artificial Sequence
  SARM1 targeting guide sequence portion
gcuccaggugauagcaccaaca

SEQ ID NO: 11316 - RNA, 22 nt, Artificial Sequence
  SARM1 targeting guide sequence portion
gcugcaggugcaccuucaggag

SEQ ID NO: 11317 - RNA, 22 nt, Artificial Sequence
  SARM1 targeting guide sequence portion
gcugcauggcuucagugucuuc

SEQ ID NO: 11318 - RNA, 22 nt, Artificial Sequence
  SARM1 targeting guide sequence portion
gcuggaagcaggcaaguucgag

SEQ ID NO: 11319 - RNA, 22 nt, Artificial Sequence
  SARM1 targeting guide sequence portion
gcuucagugucuucauugaugu

SEQ ID NO: 11320 - RNA, 22 nt, Artificial Sequence
  SARM1 targeting guide sequence portion
gcuuccagcuucuccacaucaa

SEQ ID NO: 11321 - RNA, 22 nt, Artificial Sequence
  SARM1 targeting guide sequence portion
gcuucuccacaucaaugaagac

SEQ ID NO: 11322 - RNA, 22 nt, Artificial Sequence
  SARM1 targeting guide sequence portion
ggaagcaggcaaguucgaggac

SEQ ID NO: 11323 - RNA, 22 nt, Artificial Sequence
  SARM1 targeting guide sequence portion
ggacaaacucauccagaguguc

SEQ ID NO: 11324 - RNA, 22 nt, Artificial Sequence
  SARM1 targeting guide sequence portion
ggacaagugcaugcaagaccau

SEQ ID NO: 11325 - RNA, 22 nt, Artificial Sequence
  SARM1 targeting guide sequence portion
ggagaagcuggaagcaggcaag

SEQ ID NO: 11326 - RNA, 22 nt, Artificial Sequence
  SARM1 targeting guide sequence portion
ggagcacuggacaagugcaugc

SEQ ID NO: 11327 - RNA, 22 nt, Artificial Sequence
  SARM1 targeting guide sequence portion
ggaugaguuuguccucgaacuu

SEQ ID NO: 11328 - RNA, 22 nt, Artificial Sequence
  SARM1 targeting guide sequence portion
ggcaaguucgaggacaaacuca

SEQ ID NO: 11329 - RNA, 22 nt, Artificial Sequence
  SARM1 targeting guide sequence portion
ggcacccaugacacucuggaug

SEQ ID NO: 11330 - RNA, 22 nt, Artificial Sequence
  SARM1 targeting guide sequence portion
ggcuucagugucuucauugaug

SEQ ID NO: 11331 - RNA, 22 nt, Artificial Sequence
  SARM1 targeting guide sequence portion
gggcacccaugacacucuggau

SEQ ID NO: 11332 - RNA, 22 nt, Artificial Sequence
  SARM1 targeting guide sequence portion
gggugcccgcaacuuuguguug

SEQ ID NO: 11333 - RNA, 22 nt, Artificial Sequence
  SARM1 targeting guide sequence portion
ggucuugcaugcacuuguccag

SEQ ID NO: 11334 - RNA, 22 nt, Artificial Sequence
  SARM1 targeting guide sequence portion
ggugauagcaccaacacaaagu

SEQ ID NO: 11335 - RNA, 22 nt, Artificial Sequence
  SARM1 targeting guide sequence portion
ggugcaccugcagcugcauggc

SEQ ID NO: 11336 - RNA, 22 nt, Artificial Sequence
  SARM1 targeting guide sequence portion
ggugcccgcaacuuuguguugg

SEQ ID NO: 11337 - RNA, 22 nt, Artificial Sequence
  SARM1 targeting guide sequence portion
ggugcuaucaccuggagcacug

SEQ ID NO: 11338 - RNA, 22 nt, Artificial Sequence
  SARM1 targeting guide sequence portion
gucaugggugcccgcaacuuug

SEQ ID NO: 11339 - RNA, 22 nt, Artificial Sequence
  SARM1 targeting guide sequence portion
gucauggucuugcaugcacuug

SEQ ID NO: 11340 - RNA, 22 nt, Artificial Sequence
  SARM1 targeting guide sequence portion
guccagugcuccaggugauagc

SEQ ID NO: 11341 - RNA, 22 nt, Artificial Sequence
  SARM1 targeting guide sequence portion
guccucgaacuugccugcuucc

SEQ ID NO: 11342 - RNA, 22 nt, Artificial Sequence
  SARM1 targeting guide sequence portion
gucuccugaaggugcaccugca

SEQ ID NO: 11343 - RNA, 22 nt, Artificial Sequence
  SARM1 targeting guide sequence portion
gucuucauugauguggagaagc

SEQ ID NO: 11344 - RNA, 22 nt, Artificial Sequence
  SARM1 targeting guide sequence portion
gucuugcaugcacuuguccagu

SEQ ID NO: 11345 - RNA, 22 nt, Artificial Sequence
  SARM1 targeting guide sequence portion
gugauagcaccaacacaaaguu

SEQ ID NO: 11346 - RNA, 22 nt, Artificial Sequence
  SARM1 targeting guide sequence portion
gugcaccugcagcugcauggcu

SEQ ID NO: 11347 - RNA, 22 nt, Artificial Sequence
  SARM1 targeting guide sequence portion
gugcaugcaagaccaugacugc

SEQ ID NO: 11348 - RNA, 22 nt, Artificial Sequence
  SARM1 targeting guide sequence portion
gugcccgcaacuuuguguuggu

SEQ ID NO: 11349 - RNA, 22 nt, Artificial Sequence
  SARM1 targeting guide sequence portion
gugcuaucaccuggagcacugg

SEQ ID NO: 11350 - RNA, 22 nt, Artificial Sequence
  SARM1 targeting guide sequence portion
gugcuccaggugauagcaccaa

SEQ ID NO: 11351 - RNA, 22 nt, Artificial Sequence
  SARM1 targeting guide sequence portion
guggagaagcuggaagcaggca

SEQ ID NO: 11352 - RNA, 22 nt, Artificial Sequence
  SARM1 targeting guide sequence portion
gugucaugggugcccgcaacuu

SEQ ID NO: 11353 - RNA, 22 nt, Artificial Sequence
  SARM1 targeting guide sequence portion
gugucuucauugauguggagaa

SEQ ID NO: 11354 - RNA, 22 nt, Artificial Sequence
  SARM1 targeting guide sequence portion
guguuggugcuaucaccuggag

SEQ ID NO: 11355 - RNA, 22 nt, Artificial Sequence
  SARM1 targeting guide sequence portion
guucgaggacaaacucauccag

SEQ ID NO: 11356 - RNA, 22 nt, Artificial Sequence
  SARM1 targeting guide sequence portion
guugcgggcacccaugacacuc

SEQ ID NO: 11357 - RNA, 22 nt, Artificial Sequence
  SARM1 targeting guide sequence portion
guuggugcuaucaccuggagca

SEQ ID NO: 11358 - RNA, 22 nt, Artificial Sequence
  SARM1 targeting guide sequence portion
guuuguccucgaacuugccugc

SEQ ID NO: 11359 - RNA, 22 nt, Artificial Sequence
  SARM1 targeting guide sequence portion
uaccuuaugcacccaauccuug

SEQ ID NO: 11360 - RNA, 22 nt, Artificial Sequence
  SARM1 targeting guide sequence portion
uagcaccaacacaaaguugcgg

SEQ ID NO: 11361 - RNA, 22 nt, Artificial Sequence
  SARM1 targeting guide sequence portion
uaucaccuggagcacuggacaa

SEQ ID NO: 11362 - RNA, 22 nt, Artificial Sequence
  SARM1 targeting guide sequence portion
uaugcacccaauccuugcaguc

SEQ ID NO: 11363 - RNA, 22 nt, Artificial Sequence
  SARM1 targeting guide sequence portion
ucaaugaagacacugaagccau

SEQ ID NO: 11364 - RNA, 22 nt, Artificial Sequence
  SARM1 targeting guide sequence portion
ucaccuggagcacuggacaagu

SEQ ID NO: 11365 - RNA, 22 nt, Artificial Sequence
  SARM1 targeting guide sequence portion
ucagugucuucauugaugugga

SEQ ID NO: 11366 - RNA, 22 nt, Artificial Sequence
  SARM1 targeting guide sequence portion
ucauccagagugucaugggugc

SEQ ID NO: 11367 - RNA, 22 nt, Artificial Sequence
  SARM1 targeting guide sequence portion
ucaugggugcccgcaacuuugu

SEQ ID NO: 11368 - RNA, 22 nt, Artificial Sequence
  SARM1 targeting guide sequence portion
ucauggucuugcaugcacuugu

SEQ ID NO: 11369 - RNA, 22 nt, Artificial Sequence
  SARM1 targeting guide sequence portion
ucauugauguggagaagcugga

SEQ ID NO: 11370 - RNA, 22 nt, Artificial Sequence
  SARM1 targeting guide sequence portion
uccacaucaaugaagacacuga

SEQ ID NO: 11371 - RNA, 22 nt, Artificial Sequence
  SARM1 targeting guide sequence portion
uccagagugucaugggugcccg

SEQ ID NO: 11372 - RNA, 22 nt, Artificial Sequence
  SARM1 targeting guide sequence portion
uccagcuucuccacaucaauga

SEQ ID NO: 11373 - RNA, 22 nt, Artificial Sequence
  SARM1 targeting guide sequence portion
uccaggugauagcaccaacaca

SEQ ID NO: 11374 - RNA, 22 nt, Artificial Sequence
  SARM1 targeting guide sequence portion
uccagugcuccaggugauagca

SEQ ID NO: 11375 - RNA, 22 nt, Artificial Sequence
  SARM1 targeting guide sequence portion
uccucgaacuugccugcuucca

SEQ ID NO: 11376 - RNA, 22 nt, Artificial Sequence
  SARM1 targeting guide sequence portion
uccugaaggugcaccugcagcu

SEQ ID NO: 11377 - RNA, 22 nt, Artificial Sequence
  SARM1 targeting guide sequence portion
uccuugcagucauggucuugca

SEQ ID NO: 11378 - RNA, 22 nt, Artificial Sequence
  SARM1 targeting guide sequence portion
ucgaacuugccugcuuccagcu

SEQ ID NO: 11379 - RNA, 22 nt, Artificial Sequence
  SARM1 targeting guide sequence portion
ucgaggacaaacucauccagag

SEQ ID NO: 11380 - RNA, 22 nt, Artificial Sequence
  SARM1 targeting guide sequence portion
ucuccacaucaaugaagacacu

SEQ ID NO: 11381 - RNA, 22 nt, Artificial Sequence
  SARM1 targeting guide sequence portion
ucuccugaaggugcaccugcag

SEQ ID NO: 11382 - RNA, 22 nt, Artificial Sequence
  SARM1 targeting guide sequence portion
ucuggaugaguuuguccucgaa

SEQ ID NO: 11383 - RNA, 22 nt, Artificial Sequence
  SARM1 targeting guide sequence portion
ucuucauugauguggagaagcu

SEQ ID NO: 11384 - RNA, 22 nt, Artificial Sequence
  SARM1 targeting guide sequence portion
ucuugcaugcacuuguccagug

SEQ ID NO: 11385 - RNA, 22 nt, Artificial Sequence
  SARM1 targeting guide sequence portion
ugaagacacugaagccaugcag

SEQ ID NO: 11386 - RNA, 22 nt, Artificial Sequence
  SARM1 targeting guide sequence portion
ugaagccaugcagcugcaggug

SEQ ID NO: 11387 - RNA, 22 nt, Artificial Sequence
  SARM1 targeting guide sequence portion
ugaaggugcaccugcagcugca

SEQ ID NO: 11388 - RNA, 22 nt, Artificial Sequence
  SARM1 targeting guide sequence portion
ugacacucuggaugaguuuguc

SEQ ID NO: 11389 - RNA, 22 nt, Artificial Sequence
  SARM1 targeting guide sequence portion
ugacugcaaggauugggugcau

SEQ ID NO: 11390 - RNA, 22 nt, Artificial Sequence
  SARM1 targeting guide sequence portion
ugaguuuguccucgaacuugcc

SEQ ID NO: 11391 - RNA, 22 nt, Artificial Sequence
  SARM1 targeting guide sequence portion
ugauagcaccaacacaaaguug

SEQ ID NO: 11392 - RNA, 22 nt, Artificial Sequence
  SARM1 targeting guide sequence portion
ugauguggagaagcuggaagca

SEQ ID NO: 11393 - RNA, 22 nt, Artificial Sequence
  SARM1 targeting guide sequence portion
ugcaagaccaugacugcaagga

SEQ ID NO: 11394 - RNA, 22 nt, Artificial Sequence
  SARM1 targeting guide sequence portion
ugcaaggauugggugcauaagg

SEQ ID NO: 11395 - RNA, 22 nt, Artificial Sequence
  SARM1 targeting guide sequence portion
ugcacccaauccuugcagucau

SEQ ID NO: 11396 - RNA, 22 nt, Artificial Sequence
  SARM1 targeting guide sequence portion
ugcaccugcagcugcauggcuu

SEQ ID NO: 11397 - RNA, 22 nt, Artificial Sequence
  SARM1 targeting guide sequence portion
ugcacuuguccagugcuccagg

SEQ ID NO: 11398 - RNA, 22 nt, Artificial Sequence
  SARM1 targeting guide sequence portion
ugcagcugcaggugcaccuuca

SEQ ID NO: 11399 - RNA, 22 nt, Artificial Sequence
  SARM1 targeting guide sequence portion
ugcagcugcauggcuucagugu

SEQ ID NO: 11400 - RNA, 22 nt, Artificial Sequence
  SARM1 targeting guide sequence portion
ugcaggugcaccuucaggagac

SEQ ID NO: 11401 - RNA, 22 nt, Artificial Sequence
  SARM1 targeting guide sequence portion
ugcagucauggucuugcaugca

SEQ ID NO: 11402 - RNA, 22 nt, Artificial Sequence
  SARM1 targeting guide sequence portion
ugcagucuccugaaggugcacc

SEQ ID NO: 11403 - RNA, 22 nt, Artificial Sequence
  SARM1 targeting guide sequence portion
ugcaugcaagaccaugacugca

SEQ ID NO: 11404 - RNA, 22 nt, Artificial Sequence
  SARM1 targeting guide sequence portion
ugcaugcacuuguccagugcuc

SEQ ID NO: 11405 - RNA, 22 nt, Artificial Sequence
  SARM1 targeting guide sequence portion
ugcauggcuucagugucuucau

SEQ ID NO: 11406 - RNA, 22 nt, Artificial Sequence
  SARM1 targeting guide sequence portion
ugcccgcaacuuuguguuggug

SEQ ID NO: 11407 - RNA, 22 nt, Artificial Sequence
  SARM1 targeting guide sequence portion
ugccugcuuccagcuucuccac

SEQ ID NO: 11408 - RNA, 22 nt, Artificial Sequence
  SARM1 targeting guide sequence portion
ugcgggcacccaugacacucug

SEQ ID NO: 11409 - RNA, 22 nt, Artificial Sequence
  SARM1 targeting guide sequence portion
ugcuaucaccuggagcacugga

SEQ ID NO: 11410 - RNA, 22 nt, Artificial Sequence
  SARM1 targeting guide sequence portion
ugcuccaggugauagcaccaac

SEQ ID NO: 11411 - RNA, 22 nt, Artificial Sequence
  SARM1 targeting guide sequence portion
ugcuuccagcuucuccacauca

SEQ ID NO: 11412 - RNA, 22 nt, Artificial Sequence
  SARM1 targeting guide sequence portion
uggaagcaggcaaguucgagga

SEQ ID NO: 11413 - RNA, 22 nt, Artificial Sequence
  SARM1 targeting guide sequence portion
uggacaagugcaugcaagacca

SEQ ID NO: 11414 - RNA, 22 nt, Artificial Sequence
  SARM1 targeting guide sequence portion
uggagaagcuggaagcaggcaa

SEQ ID NO: 11415 - RNA, 22 nt, Artificial Sequence
  SARM1 targeting guide sequence portion
uggagcacuggacaagugcaug

SEQ ID NO: 11416 - RNA, 22 nt, Artificial Sequence
  SARM1 targeting guide sequence portion
uggaugaguuuguccucgaacu

SEQ ID NO: 11417 - RNA, 22 nt, Artificial Sequence
  SARM1 targeting guide sequence portion
uggcuucagugucuucauugau

SEQ ID NO: 11418 - RNA, 22 nt, Artificial Sequence
  SARM1 targeting guide sequence portion
ugggugcccgcaacuuuguguu

SEQ ID NO: 11419 - RNA, 22 nt, Artificial Sequence
  SARM1 targeting guide sequence portion
uggucuugcaugcacuugucca

SEQ ID NO: 11420 - RNA, 22 nt, Artificial Sequence
  SARM1 targeting guide sequence portion
uggugcuaucaccuggagcacu

SEQ ID NO: 11421 - RNA, 22 nt, Artificial Sequence
  SARM1 targeting guide sequence portion
ugucaugggugcccgcaacuuu

SEQ ID NO: 11422 - RNA, 22 nt, Artificial Sequence
  SARM1 targeting guide sequence portion
uguccagugcuccaggugauag

SEQ ID NO: 11423 - RNA, 22 nt, Artificial Sequence
  SARM1 targeting guide sequence portion
uguccucgaacuugccugcuuc

SEQ ID NO: 11424 - RNA, 22 nt, Artificial Sequence
  SARM1 targeting guide sequence portion
ugucuucauugauguggagaag

SEQ ID NO: 11425 - RNA, 22 nt, Artificial Sequence
  SARM1 targeting guide sequence portion
uguggagaagcuggaagcaggc

SEQ ID NO: 11426 - RNA, 22 nt, Artificial Sequence
  SARM1 targeting guide sequence portion
uguguuggugcuaucaccugga

SEQ ID NO: 11427 - RNA, 22 nt, Artificial Sequence
  SARM1 targeting guide sequence portion
uguuggugcuaucaccuggagc

SEQ ID NO: 11428 - RNA, 22 nt, Artificial Sequence
  SARM1 targeting guide sequence portion
uuaugcacccaauccuugcagu

SEQ ID NO: 11429 - RNA, 22 nt, Artificial Sequence
  SARM1 targeting guide sequence portion
uucagugucuucauugaugugg

SEQ ID NO: 11430 - RNA, 22 nt, Artificial Sequence
  SARM1 targeting guide sequence portion
uucauugauguggagaagcugg

SEQ ID NO: 11431 - RNA, 22 nt, Artificial Sequence
  SARM1 targeting guide sequence portion
uuccagcuucuccacaucaaug

SEQ ID NO: 11432 - RNA, 22 nt, Artificial Sequence
  SARM1 targeting guide sequence portion
uucgaggacaaacucauccaga

SEQ ID NO: 11433 - RNA, 22 nt, Artificial Sequence
  SARM1 targeting guide sequence portion
uucuccacaucaaugaagacac

SEQ ID NO: 11434 - RNA, 22 nt, Artificial Sequence
  SARM1 targeting guide sequence portion
uugauguggagaagcuggaagc

SEQ ID NO: 11435 - RNA, 22 nt, Artificial Sequence
  SARM1 targeting guide sequence portion
uugcagucauggucuugcaugc

SEQ ID NO: 11436 - RNA, 22 nt, Artificial Sequence
  SARM1 targeting guide sequence portion
uugcagucuccugaaggugcac

SEQ ID NO: 11437 - RNA, 22 nt, Artificial Sequence
  SARM1 targeting guide sequence portion
uugcaugcacuuguccagugcu

SEQ ID NO: 11438 - RNA, 22 nt, Artificial Sequence
  SARM1 targeting guide sequence portion
uugccugcuuccagcuucucca

SEQ ID NO: 11439 - RNA, 22 nt, Artificial Sequence
  SARM1 targeting guide sequence portion
uugcgggcacccaugacacucu

SEQ ID NO: 11440 - RNA, 22 nt, Artificial Sequence
  SARM1 targeting guide sequence portion
uuggugcuaucaccuggagcac

SEQ ID NO: 11441 - RNA, 22 nt, Artificial Sequence
  SARM1 targeting guide sequence portion
uuguccagugcuccaggugaua

SEQ ID NO: 11442 - RNA, 22 nt, Artificial Sequence
  SARM1 targeting guide sequence portion
uuguccucgaacuugccugcuu

SEQ ID NO: 11443 - RNA, 22 nt, Artificial Sequence
  SARM1 targeting guide sequence portion
uuguguuggugcuaucaccugg

SEQ ID NO: 11444 - RNA, 22 nt, Artificial Sequence
  SARM1 targeting guide sequence portion
uuuguccucgaacuugccugcu

SEQ ID NO: 11445 - RNA, 22 nt, Artificial Sequence
  SARM1 targeting guide sequence portion
uuuguguuggugcuaucaccug

SEQ ID NO: 11446 - RNA, 20 nt, Artificial Sequence
  SARM1 targeting guide sequence portion
aaaguaagcacagccugcau

SEQ ID NO: 11447 - RNA, 20 nt, Artificial Sequence
  SARM1 targeting guide sequence portion
aacauugugcccaucauuga

SEQ ID NO: 11448 - RNA, 20 nt, Artificial Sequence
  SARM1 targeting guide sequence portion
aagaacauugugcccaucau

SEQ ID NO: 11449 - RNA, 20 nt, Artificial Sequence
  SARM1 targeting guide sequence portion
aagcacagccugcauguccu

SEQ ID NO: 11450 - RNA, 20 nt, Artificial Sequence
  SARM1 targeting guide sequence portion
aagccaucaaugaugggcac

SEQ ID NO: 11451 - RNA, 20 nt, Artificial Sequence
  SARM1 targeting guide sequence portion
aagcugcggcaagaacauug

SEQ ID NO: 11452 - RNA, 20 nt, Artificial Sequence
  SARM1 targeting guide sequence portion
aaguaagcacagccugcaug

SEQ ID NO: 11453 - RNA, 20 nt, Artificial Sequence
  SARM1 targeting guide sequence portion
aaugaugggcacaauguucu

SEQ ID NO: 11454 - RNA, 20 nt, Artificial Sequence
  SARM1 targeting guide sequence portion
aauguucuugccgcagcuua

SEQ ID NO: 11455 - RNA, 20 nt, Artificial Sequence
  SARM1 targeting guide sequence portion
acaauguucuugccgcagcu

SEQ ID NO: 11456 - RNA, 20 nt, Artificial Sequence
  SARM1 targeting guide sequence portion
acagccugcauguccucagg

SEQ ID NO: 11457 - RNA, 20 nt, Artificial Sequence
  SARM1 targeting guide sequence portion
acaugcaggcugugcuuacu

SEQ ID NO: 11458 - RNA, 20 nt, Artificial Sequence
  SARM1 targeting guide sequence portion
acauugugcccaucauugau

SEQ ID NO: 11459 - RNA, 20 nt, Artificial Sequence
  SARM1 targeting guide sequence portion
accguugaaaguaagcacag

SEQ ID NO: 11460 - RNA, 20 nt, Artificial Sequence
  SARM1 targeting guide sequence portion
accuggggcucaggccacuc

SEQ ID NO: 11461 - RNA, 20 nt, Artificial Sequence
  SARM1 targeting guide sequence portion
acucgaagccaucaaugaug

SEQ ID NO: 11462 - RNA, 20 nt, Artificial Sequence
  SARM1 targeting guide sequence portion
acugcuuuaagcugcggcaa

SEQ ID NO: 11463 - RNA, 20 nt, Artificial Sequence
  SARM1 targeting guide sequence portion
acuugauaccguugaaagua

SEQ ID NO: 11464 - RNA, 20 nt, Artificial Sequence
  SARM1 targeting guide sequence portion
agaacauugugcccaucauu

SEQ ID NO: 11465 - RNA, 20 nt, Artificial Sequence
  SARM1 targeting guide sequence portion
agauugugacugcuuuaagc

SEQ ID NO: 11466 - RNA, 20 nt, Artificial Sequence
  SARM1 targeting guide sequence portion
agcacagccugcauguccuc

SEQ ID NO: 11467 - RNA, 20 nt, Artificial Sequence
  SARM1 targeting guide sequence portion
agccaucaaugaugggcaca

SEQ ID NO: 11468 - RNA, 20 nt, Artificial Sequence
  SARM1 targeting guide sequence portion
agccccagguccugccugag

SEQ ID NO: 11469 - RNA, 20 nt, Artificial Sequence
  SARM1 targeting guide sequence portion
agccugcauguccucaggca

SEQ ID NO: 11470 - RNA, 20 nt, Artificial Sequence
  SARM1 targeting guide sequence portion
agcugcggcaagaacauugu

SEQ ID NO: 11471 - RNA, 20 nt, Artificial Sequence
  SARM1 targeting guide sequence portion
agcuuaaagcagucacaauc

SEQ ID NO: 11472 - RNA, 20 nt, Artificial Sequence
  SARM1 targeting guide sequence portion
aggacaugcaggcugugcuu

SEQ ID NO: 11473 - RNA, 20 nt, Artificial Sequence
  SARM1 targeting guide sequence portion
aggaccuggggcucaggcca

SEQ ID NO: 11474 - RNA, 20 nt, Artificial Sequence
  SARM1 targeting guide sequence portion
aggagauugugacugcuuua

SEQ ID NO: 11475 - RNA, 20 nt, Artificial Sequence
  SARM1 targeting guide sequence portion
aggcaggaccuggggcucag

SEQ ID NO: 11476 - RNA, 20 nt, Artificial Sequence
  SARM1 targeting guide sequence portion
aggccacucgaagccaucaa

SEQ ID NO: 11477 - RNA, 20 nt, Artificial Sequence
  SARM1 targeting guide sequence portion
aggcugugcuuacuuucaac

SEQ ID NO: 11478 - RNA, 20 nt, Artificial Sequence
  SARM1 targeting guide sequence portion
agguccugccugaggacaug

SEQ ID NO: 11479 - RNA, 20 nt, Artificial Sequence
  SARM1 targeting guide sequence portion
aguaagcacagccugcaugu

SEQ ID NO: 11480 - RNA, 20 nt, Artificial Sequence
  SARM1 targeting guide sequence portion
aguggccugagccccagguc

SEQ ID NO: 11481 - RNA, 20 nt, Artificial Sequence
  SARM1 targeting guide sequence portion
auaccguugaaaguaagcac

SEQ ID NO: 11482 - RNA, 20 nt, Artificial Sequence
  SARM1 targeting guide sequence portion
aucaaugaugggcacaaugu

SEQ ID NO: 11483 - RNA, 20 nt, Artificial Sequence
  SARM1 targeting guide sequence portion
aucauugauggcuucgagug

SEQ ID NO: 11484 - RNA, 20 nt, Artificial Sequence
  SARM1 targeting guide sequence portion
augaugggcacaauguucuu

SEQ ID NO: 11485 - RNA, 20 nt, Artificial Sequence
  SARM1 targeting guide sequence portion
augcaggcugugcuuacuuu

SEQ ID NO: 11486 - RNA, 20 nt, Artificial Sequence
  SARM1 targeting guide sequence portion
auggcuucgaguggccugag

SEQ ID NO: 11487 - RNA, 20 nt, Artificial Sequence
  SARM1 targeting guide sequence portion
augggcacaauguucuugcc

SEQ ID NO: 11488 - RNA, 20 nt, Artificial Sequence
  SARM1 targeting guide sequence portion
auguccucaggcaggaccug

SEQ ID NO: 11489 - RNA, 20 nt, Artificial Sequence
  SARM1 targeting guide sequence portion
auguucuugccgcagcuuaa

SEQ ID NO: 11490 - RNA, 20 nt, Artificial Sequence
  SARM1 targeting guide sequence portion
auugauggcuucgaguggcc

SEQ ID NO: 11491 - RNA, 20 nt, Artificial Sequence
  SARM1 targeting guide sequence portion
auugugacugcuuuaagcug

SEQ ID NO: 11492 - RNA, 20 nt, Artificial Sequence
  SARM1 targeting guide sequence portion
auugugcccaucauugaugg

SEQ ID NO: 11493 - RNA, 20 nt, Artificial Sequence
  SARM1 targeting guide sequence portion
caagaacauugugcccauca

SEQ ID NO: 11494 - RNA, 20 nt, Artificial Sequence
  SARM1 targeting guide sequence portion
caaugaugggcacaauguuc

SEQ ID NO: 11495 - RNA, 20 nt, Artificial Sequence
  SARM1 targeting guide sequence portion
caauguucuugccgcagcuu

SEQ ID NO: 11496 - RNA, 20 nt, Artificial Sequence
  SARM1 targeting guide sequence portion
cacaauguucuugccgcagc

SEQ ID NO: 11497 - RNA, 20 nt, Artificial Sequence
  SARM1 targeting guide sequence portion
cacagccugcauguccucag

SEQ ID NO: 11498 - RNA, 20 nt, Artificial Sequence
  SARM1 targeting guide sequence portion
cacucgaagccaucaaugau

SEQ ID NO: 11499 - RNA, 20 nt, Artificial Sequence
  SARM1 targeting guide sequence portion
cacuugauaccguugaaagu

SEQ ID NO: 11500 - RNA, 20 nt, Artificial Sequence
  SARM1 targeting guide sequence portion
cagccugcauguccucaggc

SEQ ID NO: 11501 - RNA, 20 nt, Artificial Sequence
  SARM1 targeting guide sequence portion
cagcuuaaagcagucacaau

SEQ ID NO: 11502 - RNA, 20 nt, Artificial Sequence
  SARM1 targeting guide sequence portion
caggaccuggggcucaggcc

SEQ ID NO: 11503 - RNA, 20 nt, Artificial Sequence
  SARM1 targeting guide sequence portion
caggagauugugacugcuuu

SEQ ID NO: 11504 - RNA, 20 nt, Artificial Sequence
  SARM1 targeting guide sequence portion
caggcaggaccuggggcuca

SEQ ID NO: 11505 - RNA, 20 nt, Artificial Sequence
  SARM1 targeting guide sequence portion
caggccacucgaagccauca

SEQ ID NO: 11506 - RNA, 20 nt, Artificial Sequence
  SARM1 targeting guide sequence portion
caggcugugcuuacuuucaa

SEQ ID NO: 11507 - RNA, 20 nt, Artificial Sequence
  SARM1 targeting guide sequence portion
cagguccugccugaggacau

SEQ ID NO: 11508 - RNA, 20 nt, Artificial Sequence
  SARM1 targeting guide sequence portion
caucaaugaugggcacaaug

SEQ ID NO: 11509 - RNA, 20 nt, Artificial Sequence
  SARM1 targeting guide sequence portion
caucauugauggcuucgagu

SEQ ID NO: 11510 - RNA, 20 nt, Artificial Sequence
  SARM1 targeting guide sequence portion
caugcaggcugugcuuacuu

SEQ ID NO: 11511 - RNA, 20 nt, Artificial Sequence
  SARM1 targeting guide sequence portion
cauguccucaggcaggaccu

SEQ ID NO: 11512 - RNA, 20 nt, Artificial Sequence
  SARM1 targeting guide sequence portion
cauugauggcuucgaguggc

SEQ ID NO: 11513 - RNA, 20 nt, Artificial Sequence
  SARM1 targeting guide sequence portion
cauugugcccaucauugaug

SEQ ID NO: 11514 - RNA, 20 nt, Artificial Sequence
  SARM1 targeting guide sequence portion
ccacucgaagccaucaauga

SEQ ID NO: 11515 - RNA, 20 nt, Artificial Sequence
  SARM1 targeting guide sequence portion
ccaggagauugugacugcuu

SEQ ID NO: 11516 - RNA, 20 nt, Artificial Sequence
  SARM1 targeting guide sequence portion
ccagguccugccugaggaca

SEQ ID NO: 11517 - RNA, 20 nt, Artificial Sequence
  SARM1 targeting guide sequence portion
ccaucaaugaugggcacaau

SEQ ID NO: 11518 - RNA, 20 nt, Artificial Sequence
  SARM1 targeting guide sequence portion
ccaucauugauggcuucgag

SEQ ID NO: 11519 - RNA, 20 nt, Artificial Sequence
  SARM1 targeting guide sequence portion
cccagguccugccugaggac

SEQ ID NO: 11520 - RNA, 20 nt, Artificial Sequence
  SARM1 targeting guide sequence portion
cccaucauugauggcuucga

SEQ ID NO: 11521 - RNA, 20 nt, Artificial Sequence
  SARM1 targeting guide sequence portion
ccccagguccugccugagga

SEQ ID NO: 11522 - RNA, 20 nt, Artificial Sequence
  SARM1 targeting guide sequence portion
ccgcagcuuaaagcagucac

SEQ ID NO: 11523 - RNA, 20 nt, Artificial Sequence
  SARM1 targeting guide sequence portion
ccguugaaaguaagcacagc

SEQ ID NO: 11524 - RNA, 20 nt, Artificial Sequence
  SARM1 targeting guide sequence portion
ccucaggcaggaccuggggc

SEQ ID NO: 11525 - RNA, 20 nt, Artificial Sequence
  SARM1 targeting guide sequence portion
ccugagccccagguccugcc

SEQ ID NO: 11526 - RNA, 20 nt, Artificial Sequence
  SARM1 targeting guide sequence portion
ccugaggacaugcaggcugu

SEQ ID NO: 11527 - RNA, 20 nt, Artificial Sequence
  SARM1 targeting guide sequence portion
ccugcauguccucaggcagg

SEQ ID NO: 11528 - RNA, 20 nt, Artificial Sequence
  SARM1 targeting guide sequence portion
ccugccugaggacaugcagg

SEQ ID NO: 11529 - RNA, 20 nt, Artificial Sequence
  SARM1 targeting guide sequence portion
ccuggggcucaggccacucg

SEQ ID NO: 11530 - RNA, 20 nt, Artificial Sequence
  SARM1 targeting guide sequence portion
cgaagccaucaaugaugggc

SEQ ID NO: 11531 - RNA, 20 nt, Artificial Sequence
  SARM1 targeting guide sequence portion
cgaguggccugagccccagg

SEQ ID NO: 11532 - RNA, 20 nt, Artificial Sequence
  SARM1 targeting guide sequence portion
cgcagcuuaaagcagucaca

SEQ ID NO: 11533 - RNA, 20 nt, Artificial Sequence
  SARM1 targeting guide sequence portion
cggcaagaacauugugccca

SEQ ID NO: 11534 - RNA, 20 nt, Artificial Sequence
  SARM1 targeting guide sequence portion
cguugaaaguaagcacagcc

SEQ ID NO: 11535 - RNA, 20 nt, Artificial Sequence
  SARM1 targeting guide sequence portion
cucacuugauaccguugaaa

SEQ ID NO: 11536 - RNA, 20 nt, Artificial Sequence
  SARM1 targeting guide sequence portion
cucaggcaggaccuggggcu

SEQ ID NO: 11537 - RNA, 20 nt, Artificial Sequence
  SARM1 targeting guide sequence portion
cucaggccacucgaagccau

SEQ ID NO: 11538 - RNA, 20 nt, Artificial Sequence
  SARM1 targeting guide sequence portion
cuccaggagauugugacugc

SEQ ID NO: 11539 - RNA, 20 nt, Artificial Sequence
  SARM1 targeting guide sequence portion
cucgaagccaucaaugaugg

SEQ ID NO: 11540 - RNA, 20 nt, Artificial Sequence
  SARM1 targeting guide sequence portion
cugagccccagguccugccu

SEQ ID NO: 11541 - RNA, 20 nt, Artificial Sequence
  SARM1 targeting guide sequence portion
cugaggacaugcaggcugug

SEQ ID NO: 11542 - RNA, 20 nt, Artificial Sequence
  SARM1 targeting guide sequence portion
cugcauguccucaggcagga

SEQ ID NO: 11543 - RNA, 20 nt, Artificial Sequence
  SARM1 targeting guide sequence portion
cugccugaggacaugcaggc

SEQ ID NO: 11544 - RNA, 20 nt, Artificial Sequence
  SARM1 targeting guide sequence portion
cugcggcaagaacauugugc

SEQ ID NO: 11545 - RNA, 20 nt, Artificial Sequence
  SARM1 targeting guide sequence portion
cugcuuuaagcugcggcaag

SEQ ID NO: 11546 - RNA, 20 nt, Artificial Sequence
  SARM1 targeting guide sequence portion
cuggggcucaggccacucga

SEQ ID NO: 11547 - RNA, 20 nt, Artificial Sequence
  SARM1 targeting guide sequence portion
cugugcuuacuuucaacggu

SEQ ID NO: 11548 - RNA, 20 nt, Artificial Sequence
  SARM1 targeting guide sequence portion
cuuaaagcagucacaaucuc

SEQ ID NO: 11549 - RNA, 20 nt, Artificial Sequence
  SARM1 targeting guide sequence portion
cuuacuuucaacgguaucaa

SEQ ID NO: 11550 - RNA, 20 nt, Artificial Sequence
  SARM1 targeting guide sequence portion
cuucgaguggccugagcccc

SEQ ID NO: 11551 - RNA, 20 nt, Artificial Sequence
  SARM1 targeting guide sequence portion
cuugauaccguugaaaguaa

SEQ ID NO: 11552 - RNA, 20 nt, Artificial Sequence
  SARM1 targeting guide sequence portion
cuugccgcagcuuaaagcag

SEQ ID NO: 11553 - RNA, 20 nt, Artificial Sequence
  SARM1 targeting guide sequence portion
cuuuaagcugcggcaagaac

SEQ ID NO: 11554 - RNA, 20 nt, Artificial Sequence
  SARM1 targeting guide sequence portion
gaaaguaagcacagccugca

SEQ ID NO: 11555 - RNA, 20 nt, Artificial Sequence
  SARM1 targeting guide sequence portion
gaacauugugcccaucauug

SEQ ID NO: 11556 - RNA, 20 nt, Artificial Sequence
  SARM1 targeting guide sequence portion
gaagccaucaaugaugggca

SEQ ID NO: 11557 - RNA, 20 nt, Artificial Sequence
  SARM1 targeting guide sequence portion
gacaugcaggcugugcuuac

SEQ ID NO: 11558 - RNA, 20 nt, Artificial Sequence
  SARM1 targeting guide sequence portion
gaccuggggcucaggccacu

SEQ ID NO: 11559 - RNA, 20 nt, Artificial Sequence
  SARM1 targeting guide sequence portion
gacugcuuuaagcugcggca

SEQ ID NO: 11560 - RNA, 20 nt, Artificial Sequence
  SARM1 targeting guide sequence portion
gagauugugacugcuuuaag

SEQ ID NO: 11561 - RNA, 20 nt, Artificial Sequence
  SARM1 targeting guide sequence portion
gagccccagguccugccuga

SEQ ID NO: 11562 - RNA, 20 nt, Artificial Sequence
  SARM1 targeting guide sequence portion
gaggacaugcaggcugugcu

SEQ ID NO: 11563 - RNA, 20 nt, Artificial Sequence
  SARM1 targeting guide sequence portion
gaguggccugagccccaggu

SEQ ID NO: 11564 - RNA, 20 nt, Artificial Sequence
  SARM1 targeting guide sequence portion
gauaccguugaaaguaagca

SEQ ID NO: 11565 - RNA, 20 nt, Artificial Sequence
  SARM1 targeting guide sequence portion
gauggcuucgaguggccuga

SEQ ID NO: 11566 - RNA, 20 nt, Artificial Sequence
  SARM1 targeting guide sequence portion
gaugggcacaauguucuugc

SEQ ID NO: 11567 - RNA, 20 nt, Artificial Sequence
  SARM1 targeting guide sequence portion
gauugugacugcuuuaagcu

SEQ ID NO: 11568 - RNA, 20 nt, Artificial Sequence
  SARM1 targeting guide sequence portion
gcaagaacauugugcccauc

SEQ ID NO: 11569 - RNA, 20 nt, Artificial Sequence
  SARM1 targeting guide sequence portion
gcacaauguucuugccgcag

SEQ ID NO: 11570 - RNA, 20 nt, Artificial Sequence
  SARM1 targeting guide sequence portion
gcacagccugcauguccuca

SEQ ID NO: 11571 - RNA, 20 nt, Artificial Sequence
  SARM1 targeting guide sequence portion
gcagcuuaaagcagucacaa

SEQ ID NO: 11572 - RNA, 20 nt, Artificial Sequence
  SARM1 targeting guide sequence portion
gcaggaccuggggcucaggc

SEQ ID NO: 11573 - RNA, 20 nt, Artificial Sequence
  SARM1 targeting guide sequence portion
gcaggcugugcuuacuuuca

SEQ ID NO: 11574 - RNA, 20 nt, Artificial Sequence
  SARM1 targeting guide sequence portion
gcauguccucaggcaggacc

SEQ ID NO: 11575 - RNA, 20 nt, Artificial Sequence
  SARM1 targeting guide sequence portion
gccacucgaagccaucaaug

SEQ ID NO: 11576 - RNA, 20 nt, Artificial Sequence
  SARM1 targeting guide sequence portion
gccaucaaugaugggcacaa

SEQ ID NO: 11577 - RNA, 20 nt, Artificial Sequence
  SARM1 targeting guide sequence portion
gcccaucauugauggcuucg

SEQ ID NO: 11578 - RNA, 20 nt, Artificial Sequence
  SARM1 targeting guide sequence portion
gccccagguccugccugagg

SEQ ID NO: 11579 - RNA, 20 nt, Artificial Sequence
  SARM1 targeting guide sequence portion
gccgcagcuuaaagcaguca

SEQ ID NO: 11580 - RNA, 20 nt, Artificial Sequence
  SARM1 targeting guide sequence portion
gccugagccccagguccugc

SEQ ID NO: 11581 - RNA, 20 nt, Artificial Sequence
  SARM1 targeting guide sequence portion
gccugaggacaugcaggcug

SEQ ID NO: 11582 - RNA, 20 nt, Artificial Sequence
  SARM1 targeting guide sequence portion
gccugcauguccucaggcag

SEQ ID NO: 11583 - RNA, 20 nt, Artificial Sequence
  SARM1 targeting guide sequence portion
gcggcaagaacauugugccc

SEQ ID NO: 11584 - RNA, 20 nt, Artificial Sequence
  SARM1 targeting guide sequence portion
gcucacuugauaccguugaa

SEQ ID NO: 11585 - RNA, 20 nt, Artificial Sequence
  SARM1 targeting guide sequence portion
gcucaggccacucgaagcca

SEQ ID NO: 11586 - RNA, 20 nt, Artificial Sequence
  SARM1 targeting guide sequence portion
gcugcggcaagaacauugug

SEQ ID NO: 11587 - RNA, 20 nt, Artificial Sequence
  SARM1 targeting guide sequence portion
gcugugcuuacuuucaacgg

SEQ ID NO: 11588 - RNA, 20 nt, Artificial Sequence
  SARM1 targeting guide sequence portion
gcuuaaagcagucacaaucu

SEQ ID NO: 11589 - RNA, 20 nt, Artificial Sequence
  SARM1 targeting guide sequence portion
gcuuacuuucaacgguauca

SEQ ID NO: 11590 - RNA, 20 nt, Artificial Sequence
  SARM1 targeting guide sequence portion
gcuucgaguggccugagccc

SEQ ID NO: 11591 - RNA, 20 nt, Artificial Sequence
  SARM1 targeting guide sequence portion
gcuuuaagcugcggcaagaa

SEQ ID NO: 11592 - RNA, 20 nt, Artificial Sequence
  SARM1 targeting guide sequence portion
ggacaugcaggcugugcuua

SEQ ID NO: 11593 - RNA, 20 nt, Artificial Sequence
  SARM1 targeting guide sequence portion
ggaccuggggcucaggccac

SEQ ID NO: 11594 - RNA, 20 nt, Artificial Sequence
  SARM1 targeting guide sequence portion
ggagauugugacugcuuuaa

SEQ ID NO: 11595 - RNA, 20 nt, Artificial Sequence
  SARM1 targeting guide sequence portion
ggcaagaacauugugcccau

SEQ ID NO: 11596 - RNA, 20 nt, Artificial Sequence
  SARM1 targeting guide sequence portion
ggcacaauguucuugccgca

SEQ ID NO: 11597 - RNA, 20 nt, Artificial Sequence
  SARM1 targeting guide sequence portion
ggcaggaccuggggcucagg

SEQ ID NO: 11598 - RNA, 20 nt, Artificial Sequence
  SARM1 targeting guide sequence portion
ggccacucgaagccaucaau

SEQ ID NO: 11599 - RNA, 20 nt, Artificial Sequence
  SARM1 targeting guide sequence portion
ggccugagccccagguccug

SEQ ID NO: 11600 - RNA, 20 nt, Artificial Sequence
  SARM1 targeting guide sequence portion
ggcucacuugauaccguuga

SEQ ID NO: 11601 - RNA, 20 nt, Artificial Sequence
  SARM1 targeting guide sequence portion
ggcucaggccacucgaagcc

SEQ ID NO: 11602 - RNA, 20 nt, Artificial Sequence
  SARM1 targeting guide sequence portion
ggcugugcuuacuuucaacg

SEQ ID NO: 11603 - RNA, 20 nt, Artificial Sequence
  SARM1 targeting guide sequence portion
ggcuucgaguggccugagcc

SEQ ID NO: 11604 - RNA, 20 nt, Artificial Sequence
  SARM1 targeting guide sequence portion
gggcacaauguucuugccgc

SEQ ID NO: 11605 - RNA, 20 nt, Artificial Sequence
  SARM1 targeting guide sequence portion
gggcucaggccacucgaagc

SEQ ID NO: 11606 - RNA, 20 nt, Artificial Sequence
  SARM1 targeting guide sequence portion
ggggcucaggccacucgaag

SEQ ID NO: 11607 - RNA, 20 nt, Artificial Sequence
  SARM1 targeting guide sequence portion
gguccugccugaggacaugc

SEQ ID NO: 11608 - RNA, 20 nt, Artificial Sequence
  SARM1 targeting guide sequence portion
guaagcacagccugcauguc

SEQ ID NO: 11609 - RNA, 20 nt, Artificial Sequence
  SARM1 targeting guide sequence portion
guccucaggcaggaccuggg

SEQ ID NO: 11610 - RNA, 20 nt, Artificial Sequence
  SARM1 targeting guide sequence portion
guccugccugaggacaugca

SEQ ID NO: 11611 - RNA, 20 nt, Artificial Sequence
  SARM1 targeting guide sequence portion
gugacugcuuuaagcugcgg

SEQ ID NO: 11612 - RNA, 20 nt, Artificial Sequence
  SARM1 targeting guide sequence portion
gugcccaucauugauggcuu

SEQ ID NO: 11613 - RNA, 20 nt, Artificial Sequence
  SARM1 targeting guide sequence portion
gugcuuacuuucaacgguau

SEQ ID NO: 11614 - RNA, 20 nt, Artificial Sequence
  SARM1 targeting guide sequence portion
guggccugagccccaggucc

SEQ ID NO: 11615 - RNA, 20 nt, Artificial Sequence
  SARM1 targeting guide sequence portion
guucuugccgcagcuuaaag

SEQ ID NO: 11616 - RNA, 20 nt, Artificial Sequence
  SARM1 targeting guide sequence portion
guugaaaguaagcacagccu

SEQ ID NO: 11617 - RNA, 20 nt, Artificial Sequence
  SARM1 targeting guide sequence portion
uaagcacagccugcaugucc

SEQ ID NO: 11618 - RNA, 20 nt, Artificial Sequence
  SARM1 targeting guide sequence portion
uaagcugcggcaagaacauu

SEQ ID NO: 11619 - RNA, 20 nt, Artificial Sequence
  SARM1 targeting guide sequence portion
uaccguugaaaguaagcaca

SEQ ID NO: 11620 - RNA, 20 nt, Artificial Sequence
  SARM1 targeting guide sequence portion
ucaaugaugggcacaauguu

SEQ ID NO: 11621 - RNA, 20 nt, Artificial Sequence
  SARM1 targeting guide sequence portion
ucacuugauaccguugaaag

SEQ ID NO: 11622 - RNA, 20 nt, Artificial Sequence
  SARM1 targeting guide sequence portion
ucaggcaggaccuggggcuc

SEQ ID NO: 11623 - RNA, 20 nt, Artificial Sequence
  SARM1 targeting guide sequence portion
ucaggccacucgaagccauc

SEQ ID NO: 11624 - RNA, 20 nt, Artificial Sequence
  SARM1 targeting guide sequence portion
ucauugauggcuucgagugg

SEQ ID NO: 11625 - RNA, 20 nt, Artificial Sequence
  SARM1 targeting guide sequence portion
uccaggagauugugacugcu

SEQ ID NO: 11626 - RNA, 20 nt, Artificial Sequence
  SARM1 targeting guide sequence portion
uccucaggcaggaccugggg

SEQ ID NO: 11627 - RNA, 20 nt, Artificial Sequence
  SARM1 targeting guide sequence portion
uccugccugaggacaugcag

SEQ ID NO: 11628 - RNA, 20 nt, Artificial Sequence
  SARM1 targeting guide sequence portion
ucgaagccaucaaugauggg

SEQ ID NO: 11629 - RNA, 20 nt, Artificial Sequence
  SARM1 targeting guide sequence portion
ucgaguggccugagccccag

SEQ ID NO: 11630 - RNA, 20 nt, Artificial Sequence
  SARM1 targeting guide sequence portion
ucuccaggagauugugacug

SEQ ID NO: 11631 - RNA, 20 nt, Artificial Sequence
  SARM1 targeting guide sequence portion
ucuugccgcagcuuaaagca

SEQ ID NO: 11632 - RNA, 20 nt, Artificial Sequence
  SARM1 targeting guide sequence portion
ugaaaguaagcacagccugc

SEQ ID NO: 11633 - RNA, 20 nt, Artificial Sequence
  SARM1 targeting guide sequence portion
ugacugcuuuaagcugcggc

SEQ ID NO: 11634 - RNA, 20 nt, Artificial Sequence
  SARM1 targeting guide sequence portion
ugagccccagguccugccug

SEQ ID NO: 11635 - RNA, 20 nt, Artificial Sequence
  SARM1 targeting guide sequence portion
ugaggacaugcaggcugugc

SEQ ID NO: 11636 - RNA, 20 nt, Artificial Sequence
  SARM1 targeting guide sequence portion
ugauaccguugaaaguaagc

SEQ ID NO: 11637 - RNA, 20 nt, Artificial Sequence
  SARM1 targeting guide sequence portion
ugauggcuucgaguggccug

SEQ ID NO: 11638 - RNA, 20 nt, Artificial Sequence
  SARM1 targeting guide sequence portion
ugaugggcacaauguucuug

SEQ ID NO: 11639 - RNA, 20 nt, Artificial Sequence
  SARM1 targeting guide sequence portion
ugcaggcugugcuuacuuuc

SEQ ID NO: 11640 - RNA, 20 nt, Artificial Sequence
  SARM1 targeting guide sequence portion
ugcauguccucaggcaggac

SEQ ID NO: 11641 - RNA, 20 nt, Artificial Sequence
  SARM1 targeting guide sequence portion
ugcccaucauugauggcuuc

SEQ ID NO: 11642 - RNA, 20 nt, Artificial Sequence
  SARM1 targeting guide sequence portion
ugccgcagcuuaaagcaguc

SEQ ID NO: 11643 - RNA, 20 nt, Artificial Sequence
  SARM1 targeting guide sequence portion
ugccugaggacaugcaggcu

SEQ ID NO: 11644 - RNA, 20 nt, Artificial Sequence
  SARM1 targeting guide sequence portion
ugcggcaagaacauugugcc

SEQ ID NO: 11645 - RNA, 20 nt, Artificial Sequence
  SARM1 targeting guide sequence portion
ugcuuacuuucaacgguauc

SEQ ID NO: 11646 - RNA, 20 nt, Artificial Sequence
  SARM1 targeting guide sequence portion
ugcuuuaagcugcggcaaga

SEQ ID NO: 11647 - RNA, 20 nt, Artificial Sequence
  SARM1 targeting guide sequence portion
uggccugagccccagguccu

SEQ ID NO: 11648 - RNA, 20 nt, Artificial Sequence
  SARM1 targeting guide sequence portion
uggcuucgaguggccugagc

SEQ ID NO: 11649 - RNA, 20 nt, Artificial Sequence
  SARM1 targeting guide sequence portion
ugggcacaauguucuugccg

SEQ ID NO: 11650 - RNA, 20 nt, Artificial Sequence
  SARM1 targeting guide sequence portion
uggggcucaggccacucgaa

SEQ ID NO: 11651 - RNA, 20 nt, Artificial Sequence
  SARM1 targeting guide sequence portion
uguccucaggcaggaccugg

SEQ ID NO: 11652 - RNA, 20 nt, Artificial Sequence
  SARM1 targeting guide sequence portion
ugugacugcuuuaagcugcg

SEQ ID NO: 11653 - RNA, 20 nt, Artificial Sequence
  SARM1 targeting guide sequence portion
ugugcccaucauugauggcu

SEQ ID NO: 11654 - RNA, 20 nt, Artificial Sequence
  SARM1 targeting guide sequence portion
ugugcuuacuuucaacggua

SEQ ID NO: 11655 - RNA, 20 nt, Artificial Sequence
  SARM1 targeting guide sequence portion
uguucuugccgcagcuuaaa

SEQ ID NO: 11656 - RNA, 20 nt, Artificial Sequence
  SARM1 targeting guide sequence portion
uuaaagcagucacaaucucc

SEQ ID NO: 11657 - RNA, 20 nt, Artificial Sequence
  SARM1 targeting guide sequence portion
uuaagcugcggcaagaacau

SEQ ID NO: 11658 - RNA, 20 nt, Artificial Sequence
  SARM1 targeting guide sequence portion
uuacuuucaacgguaucaag

SEQ ID NO: 11659 - RNA, 20 nt, Artificial Sequence
  SARM1 targeting guide sequence portion
uucgaguggccugagcccca

SEQ ID NO: 11660 - RNA, 20 nt, Artificial Sequence
  SARM1 targeting guide sequence portion
uucuugccgcagcuuaaagc

SEQ ID NO: 11661 - RNA, 20 nt, Artificial Sequence
  SARM1 targeting guide sequence portion
uugaaaguaagcacagccug

SEQ ID NO: 11662 - RNA, 20 nt, Artificial Sequence
  SARM1 targeting guide sequence portion
uugauaccguugaaaguaag

SEQ ID NO: 11663 - RNA, 20 nt, Artificial Sequence
  SARM1 targeting guide sequence portion
uugauggcuucgaguggccu

SEQ ID NO: 11664 - RNA, 20 nt, Artificial Sequence
  SARM1 targeting guide sequence portion
uugccgcagcuuaaagcagu

SEQ ID NO: 11665 - RNA, 20 nt, Artificial Sequence
  SARM1 targeting guide sequence portion
uugugacugcuuuaagcugc

SEQ ID NO: 11666 - RNA, 20 nt, Artificial Sequence
  SARM1 targeting guide sequence portion
uugugcccaucauugauggc

SEQ ID NO: 11667 - RNA, 20 nt, Artificial Sequence
  SARM1 targeting guide sequence portion
uuuaagcugcggcaagaaca

SEQ ID NO: 11668 - RNA, 21 nt, Artificial Sequence
  SARM1 targeting guide sequence portion
aaaguaagcacagccugcaug

SEQ ID NO: 11669 - RNA, 21 nt, Artificial Sequence
  SARM1 targeting guide sequence portion
aacauugugcccaucauugau

SEQ ID NO: 11670 - RNA, 21 nt, Artificial Sequence
  SARM1 targeting guide sequence portion
aagaacauugugcccaucauu

SEQ ID NO: 11671 - RNA, 21 nt, Artificial Sequence
  SARM1 targeting guide sequence portion
aagcacagccugcauguccuc

SEQ ID NO: 11672 - RNA, 21 nt, Artificial Sequence
  SARM1 targeting guide sequence portion
aagccaucaaugaugggcaca

SEQ ID NO: 11673 - RNA, 21 nt, Artificial Sequence
  SARM1 targeting guide sequence portion
aagcugcggcaagaacauugu

SEQ ID NO: 11674 - RNA, 21 nt, Artificial Sequence
  SARM1 targeting guide sequence portion
aaguaagcacagccugcaugu

SEQ ID NO: 11675 - RNA, 21 nt, Artificial Sequence
  SARM1 targeting guide sequence portion
aaugaugggcacaauguucuu

SEQ ID NO: 11676 - RNA, 21 nt, Artificial Sequence
  SARM1 targeting guide sequence portion
aauguucuugccgcagcuuaa

SEQ ID NO: 11677 - RNA, 21 nt, Artificial Sequence
  SARM1 targeting guide sequence portion
acaauguucuugccgcagcuu

SEQ ID NO: 11678 - RNA, 21 nt, Artificial Sequence
  SARM1 targeting guide sequence portion
acagccugcauguccucaggc

SEQ ID NO: 11679 - RNA, 21 nt, Artificial Sequence
  SARM1 targeting guide sequence portion
acaugcaggcugugcuuacuu

SEQ ID NO: 11680 - RNA, 21 nt, Artificial Sequence
  SARM1 targeting guide sequence portion
acauugugcccaucauugaug

SEQ ID NO: 11681 - RNA, 21 nt, Artificial Sequence
  SARM1 targeting guide sequence portion
accguugaaaguaagcacagc

SEQ ID NO: 11682 - RNA, 21 nt, Artificial Sequence
  SARM1 targeting guide sequence portion
accuggggcucaggccacucg

SEQ ID NO: 11683 - RNA, 21 nt, Artificial Sequence
  SARM1 targeting guide sequence portion
acucgaagccaucaaugaugg

SEQ ID NO: 11684 - RNA, 21 nt, Artificial Sequence
  SARM1 targeting guide sequence portion
acugcuuuaagcugcggcaag

SEQ ID NO: 11685 - RNA, 21 nt, Artificial Sequence
  SARM1 targeting guide sequence portion
acuugauaccguugaaaguaa

SEQ ID NO: 11686 - RNA, 21 nt, Artificial Sequence
  SARM1 targeting guide sequence portion
agaacauugugcccaucauug

SEQ ID NO: 11687 - RNA, 21 nt, Artificial Sequence
  SARM1 targeting guide sequence portion
agauugugacugcuuuaagcu

SEQ ID NO: 11688 - RNA, 21 nt, Artificial Sequence
  SARM1 targeting guide sequence portion
agcacagccugcauguccuca

SEQ ID NO: 11689 - RNA, 21 nt, Artificial Sequence
  SARM1 targeting guide sequence portion
agccaucaaugaugggcacaa

SEQ ID NO: 11690 - RNA, 21 nt, Artificial Sequence
  SARM1 targeting guide sequence portion
agccccagguccugccugagg

SEQ ID NO: 11691 - RNA, 21 nt, Artificial Sequence
  SARM1 targeting guide sequence portion
agccugcauguccucaggcag

SEQ ID NO: 11692 - RNA, 21 nt, Artificial Sequence
  SARM1 targeting guide sequence portion
agcugcggcaagaacauugug

SEQ ID NO: 11693 - RNA, 21 nt, Artificial Sequence
  SARM1 targeting guide sequence portion
agcuuaaagcagucacaaucu

SEQ ID NO: 11694 - RNA, 21 nt, Artificial Sequence
  SARM1 targeting guide sequence portion
aggacaugcaggcugugcuua

SEQ ID NO: 11695 - RNA, 21 nt, Artificial Sequence
  SARM1 targeting guide sequence portion
aggaccuggggcucaggccac

SEQ ID NO: 11696 - RNA, 21 nt, Artificial Sequence
  SARM1 targeting guide sequence portion
aggagauugugacugcuuuaa

SEQ ID NO: 11697 - RNA, 21 nt, Artificial Sequence
  SARM1 targeting guide sequence portion
aggcaggaccuggggcucagg

SEQ ID NO: 11698 - RNA, 21 nt, Artificial Sequence
  SARM1 targeting guide sequence portion
aggccacucgaagccaucaau

SEQ ID NO: 11699 - RNA, 21 nt, Artificial Sequence
  SARM1 targeting guide sequence portion
aggcugugcuuacuuucaacg

SEQ ID NO: 11700 - RNA, 21 nt, Artificial Sequence
  SARM1 targeting guide sequence portion
agguccugccugaggacaugc

SEQ ID NO: 11701 - RNA, 21 nt, Artificial Sequence
  SARM1 targeting guide sequence portion
aguaagcacagccugcauguc

SEQ ID NO: 11702 - RNA, 21 nt, Artificial Sequence
  SARM1 targeting guide sequence portion
aguggccugagccccaggucc

SEQ ID NO: 11703 - RNA, 21 nt, Artificial Sequence
  SARM1 targeting guide sequence portion
auaccguugaaaguaagcaca

SEQ ID NO: 11704 - RNA, 21 nt, Artificial Sequence
  SARM1 targeting guide sequence portion
aucaaugaugggcacaauguu

SEQ ID NO: 11705 - RNA, 21 nt, Artificial Sequence
  SARM1 targeting guide sequence portion
aucauugauggcuucgagugg

SEQ ID NO: 11706 - RNA, 21 nt, Artificial Sequence
  SARM1 targeting guide sequence portion
augaugggcacaauguucuug

SEQ ID NO: 11707 - RNA, 21 nt, Artificial Sequence
  SARM1 targeting guide sequence portion
augcaggcugugcuuacuuuc

SEQ ID NO: 11708 - RNA, 21 nt, Artificial Sequence
  SARM1 targeting guide sequence portion
auggcuucgaguggccugagc

SEQ ID NO: 11709 - RNA, 21 nt, Artificial Sequence
  SARM1 targeting guide sequence portion
augggcacaauguucuugccg

SEQ ID NO: 11710 - RNA, 21 nt, Artificial Sequence
  SARM1 targeting guide sequence portion
auguccucaggcaggaccugg

SEQ ID NO: 11711 - RNA, 21 nt, Artificial Sequence
  SARM1 targeting guide sequence portion
auguucuugccgcagcuuaaa

SEQ ID NO: 11712 - RNA, 21 nt, Artificial Sequence
  SARM1 targeting guide sequence portion
auugauggcuucgaguggccu

SEQ ID NO: 11713 - RNA, 21 nt, Artificial Sequence
  SARM1 targeting guide sequence portion
auugugacugcuuuaagcugc

SEQ ID NO: 11714 - RNA, 21 nt, Artificial Sequence
  SARM1 targeting guide sequence portion
auugugcccaucauugauggc

SEQ ID NO: 11715 - RNA, 21 nt, Artificial Sequence
  SARM1 targeting guide sequence portion
caagaacauugugcccaucau

SEQ ID NO: 11716 - RNA, 21 nt, Artificial Sequence
  SARM1 targeting guide sequence portion
caaugaugggcacaauguucu

SEQ ID NO: 11717 - RNA, 21 nt, Artificial Sequence
  SARM1 targeting guide sequence portion
caauguucuugccgcagcuua

SEQ ID NO: 11718 - RNA, 21 nt, Artificial Sequence
  SARM1 targeting guide sequence portion
cacaauguucuugccgcagcu

SEQ ID NO: 11719 - RNA, 21 nt, Artificial Sequence
  SARM1 targeting guide sequence portion
cacagccugcauguccucagg

SEQ ID NO: 11720 - RNA, 21 nt, Artificial Sequence
  SARM1 targeting guide sequence portion
cacucgaagccaucaaugaug

SEQ ID NO: 11721 - RNA, 21 nt, Artificial Sequence
  SARM1 targeting guide sequence portion
cacuugauaccguugaaagua

SEQ ID NO: 11722 - RNA, 21 nt, Artificial Sequence
  SARM1 targeting guide sequence portion
cagccugcauguccucaggca

SEQ ID NO: 11723 - RNA, 21 nt, Artificial Sequence
  SARM1 targeting guide sequence portion
cagcuuaaagcagucacaauc

SEQ ID NO: 11724 - RNA, 21 nt, Artificial Sequence
  SARM1 targeting guide sequence portion
caggaccuggggcucaggcca

SEQ ID NO: 11725 - RNA, 21 nt, Artificial Sequence
  SARM1 targeting guide sequence portion
caggagauugugacugcuuua

SEQ ID NO: 11726 - RNA, 21 nt, Artificial Sequence
  SARM1 targeting guide sequence portion
caggcaggaccuggggcucag

SEQ ID NO: 11727 - RNA, 21 nt, Artificial Sequence
  SARM1 targeting guide sequence portion
caggccacucgaagccaucaa

SEQ ID NO: 11728 - RNA, 21 nt, Artificial Sequence
  SARM1 targeting guide sequence portion
caggcugugcuuacuuucaac

SEQ ID NO: 11729 - RNA, 21 nt, Artificial Sequence
  SARM1 targeting guide sequence portion
cagguccugccugaggacaug

SEQ ID NO: 11730 - RNA, 21 nt, Artificial Sequence
  SARM1 targeting guide sequence portion
caucaaugaugggcacaaugu

SEQ ID NO: 11731 - RNA, 21 nt, Artificial Sequence
  SARM1 targeting guide sequence portion
caucauugauggcuucgagug

SEQ ID NO: 11732 - RNA, 21 nt, Artificial Sequence
  SARM1 targeting guide sequence portion
caugcaggcugugcuuacuuu

SEQ ID NO: 11733 - RNA, 21 nt, Artificial Sequence
  SARM1 targeting guide sequence portion
cauguccucaggcaggaccug

SEQ ID NO: 11734 - RNA, 21 nt, Artificial Sequence
  SARM1 targeting guide sequence portion
cauugauggcuucgaguggcc

SEQ ID NO: 11735 - RNA, 21 nt, Artificial Sequence
  SARM1 targeting guide sequence portion
cauugugcccaucauugaugg

SEQ ID NO: 11736 - RNA, 21 nt, Artificial Sequence
  SARM1 targeting guide sequence portion
ccacucgaagccaucaaugau

SEQ ID NO: 11737 - RNA, 21 nt, Artificial Sequence
  SARM1 targeting guide sequence portion
ccaggagauugugacugcuuu

SEQ ID NO: 11738 - RNA, 21 nt, Artificial Sequence
  SARM1 targeting guide sequence portion
ccagguccugccugaggacau

SEQ ID NO: 11739 - RNA, 21 nt, Artificial Sequence
  SARM1 targeting guide sequence portion
ccaucaaugaugggcacaaug

SEQ ID NO: 11740 - RNA, 21 nt, Artificial Sequence
  SARM1 targeting guide sequence portion
ccaucauugauggcuucgagu

SEQ ID NO: 11741 - RNA, 21 nt, Artificial Sequence
  SARM1 targeting guide sequence portion
cccagguccugccugaggaca

SEQ ID NO: 11742 - RNA, 21 nt, Artificial Sequence
  SARM1 targeting guide sequence portion
cccaucauugauggcuucgag

SEQ ID NO: 11743 - RNA, 21 nt, Artificial Sequence
  SARM1 targeting guide sequence portion
ccccagguccugccugaggac

SEQ ID NO: 11744 - RNA, 21 nt, Artificial Sequence
  SARM1 targeting guide sequence portion
ccgcagcuuaaagcagucaca

SEQ ID NO: 11745 - RNA, 21 nt, Artificial Sequence
  SARM1 targeting guide sequence portion
ccguugaaaguaagcacagcc

SEQ ID NO: 11746 - RNA, 21 nt, Artificial Sequence
  SARM1 targeting guide sequence portion
ccucaggcaggaccuggggcu

SEQ ID NO: 11747 - RNA, 21 nt, Artificial Sequence
  SARM1 targeting guide sequence portion
ccugagccccagguccugccu

SEQ ID NO: 11748 - RNA, 21 nt, Artificial Sequence
  SARM1 targeting guide sequence portion
ccugaggacaugcaggcugug

SEQ ID NO: 11749 - RNA, 21 nt, Artificial Sequence
  SARM1 targeting guide sequence portion
ccugcauguccucaggcagga

SEQ ID NO: 11750 - RNA, 21 nt, Artificial Sequence
  SARM1 targeting guide sequence portion
ccugccugaggacaugcaggc

SEQ ID NO: 11751 - RNA, 21 nt, Artificial Sequence
  SARM1 targeting guide sequence portion
ccuggggcucaggccacucga

SEQ ID NO: 11752 - RNA, 21 nt, Artificial Sequence
  SARM1 targeting guide sequence portion
cgaagccaucaaugaugggca

SEQ ID NO: 11753 - RNA, 21 nt, Artificial Sequence
  SARM1 targeting guide sequence portion
cgaguggccugagccccaggu

SEQ ID NO: 11754 - RNA, 21 nt, Artificial Sequence
  SARM1 targeting guide sequence portion
cgcagcuuaaagcagucacaa

SEQ ID NO: 11755 - RNA, 21 nt, Artificial Sequence
  SARM1 targeting guide sequence portion
cggcaagaacauugugcccau

SEQ ID NO: 11756 - RNA, 21 nt, Artificial Sequence
  SARM1 targeting guide sequence portion
cguugaaaguaagcacagccu

SEQ ID NO: 11757 - RNA, 21 nt, Artificial Sequence
  SARM1 targeting guide sequence portion
cucacuugauaccguugaaag

SEQ ID NO: 11758 - RNA, 21 nt, Artificial Sequence
  SARM1 targeting guide sequence portion
cucaggcaggaccuggggcuc

SEQ ID NO: 11759 - RNA, 21 nt, Artificial Sequence
  SARM1 targeting guide sequence portion
cucaggccacucgaagccauc

SEQ ID NO: 11760 - RNA, 21 nt, Artificial Sequence
  SARM1 targeting guide sequence portion
cuccaggagauugugacugcu

SEQ ID NO: 11761 - RNA, 21 nt, Artificial Sequence
  SARM1 targeting guide sequence portion
cucgaagccaucaaugauggg

SEQ ID NO: 11762 - RNA, 21 nt, Artificial Sequence
  SARM1 targeting guide sequence portion
cugagccccagguccugccug

SEQ ID NO: 11763 - RNA, 21 nt, Artificial Sequence
  SARM1 targeting guide sequence portion
cugaggacaugcaggcugugc

SEQ ID NO: 11764 - RNA, 21 nt, Artificial Sequence
  SARM1 targeting guide sequence portion
cugcauguccucaggcaggac

SEQ ID NO: 11765 - RNA, 21 nt, Artificial Sequence
  SARM1 targeting guide sequence portion
cugccugaggacaugcaggcu

SEQ ID NO: 11766 - RNA, 21 nt, Artificial Sequence
  SARM1 targeting guide sequence portion
cugcggcaagaacauugugcc

SEQ ID NO: 11767 - RNA, 21 nt, Artificial Sequence
  SARM1 targeting guide sequence portion
cugcuuuaagcugcggcaaga

SEQ ID NO: 11768 - RNA, 21 nt, Artificial Sequence
  SARM1 targeting guide sequence portion
cuggggcucaggccacucgaa

SEQ ID NO: 11769 - RNA, 21 nt, Artificial Sequence
  SARM1 targeting guide sequence portion
cugugcuuacuuucaacggua

SEQ ID NO: 11770 - RNA, 21 nt, Artificial Sequence
  SARM1 targeting guide sequence portion
cuuaaagcagucacaaucucc

SEQ ID NO: 11771 - RNA, 21 nt, Artificial Sequence
  SARM1 targeting guide sequence portion
cuuacuuucaacgguaucaag

SEQ ID NO: 11772 - RNA, 21 nt, Artificial Sequence
  SARM1 targeting guide sequence portion
cuucgaguggccugagcccca

SEQ ID NO: 11773 - RNA, 21 nt, Artificial Sequence
  SARM1 targeting guide sequence portion
cuugauaccguugaaaguaag

SEQ ID NO: 11774 - RNA, 21 nt, Artificial Sequence
  SARM1 targeting guide sequence portion
cuugccgcagcuuaaagcagu

SEQ ID NO: 11775 - RNA, 21 nt, Artificial Sequence
  SARM1 targeting guide sequence portion
cuuuaagcugcggcaagaaca

SEQ ID NO: 11776 - RNA, 21 nt, Artificial Sequence
  SARM1 targeting guide sequence portion
gaaaguaagcacagccugcau

SEQ ID NO: 11777 - RNA, 21 nt, Artificial Sequence
  SARM1 targeting guide sequence portion
gaacauugugcccaucauuga

SEQ ID NO: 11778 - RNA, 21 nt, Artificial Sequence
  SARM1 targeting guide sequence portion
gaagccaucaaugaugggcac

SEQ ID NO: 11779 - RNA, 21 nt, Artificial Sequence
  SARM1 targeting guide sequence portion
gacaugcaggcugugcuuacu

SEQ ID NO: 11780 - RNA, 21 nt, Artificial Sequence
  SARM1 targeting guide sequence portion
gaccuggggcucaggccacuc

SEQ ID NO: 11781 - RNA, 21 nt, Artificial Sequence
  SARM1 targeting guide sequence portion
gacugcuuuaagcugcggcaa

SEQ ID NO: 11782 - RNA, 21 nt, Artificial Sequence
  SARM1 targeting guide sequence portion
gagauugugacugcuuuaagc

SEQ ID NO: 11783 - RNA, 21 nt, Artificial Sequence
  SARM1 targeting guide sequence portion
gagccccagguccugccugag

SEQ ID NO: 11784 - RNA, 21 nt, Artificial Sequence
  SARM1 targeting guide sequence portion
gaggacaugcaggcugugcuu

SEQ ID NO: 11785 - RNA, 21 nt, Artificial Sequence
  SARM1 targeting guide sequence portion
gaguggccugagccccagguc

SEQ ID NO: 11786 - RNA, 21 nt, Artificial Sequence
  SARM1 targeting guide sequence portion
gauaccguugaaaguaagcac

SEQ ID NO: 11787 - RNA, 21 nt, Artificial Sequence
  SARM1 targeting guide sequence portion
gauggcuucgaguggccugag

SEQ ID NO: 11788 - RNA, 21 nt, Artificial Sequence
  SARM1 targeting guide sequence portion
gaugggcacaauguucuugcc

SEQ ID NO: 11789 - RNA, 21 nt, Artificial Sequence
  SARM1 targeting guide sequence portion
gauugugacugcuuuaagcug

SEQ ID NO: 11790 - RNA, 21 nt, Artificial Sequence
  SARM1 targeting guide sequence portion
gcaagaacauugugcccauca

SEQ ID NO: 11791 - RNA, 21 nt, Artificial Sequence
  SARM1 targeting guide sequence portion
gcacaauguucuugccgcagc

SEQ ID NO: 11792 - RNA, 21 nt, Artificial Sequence
  SARM1 targeting guide sequence portion
gcacagccugcauguccucag

SEQ ID NO: 11793 - RNA, 21 nt, Artificial Sequence
  SARM1 targeting guide sequence portion
gcagcuuaaagcagucacaau

SEQ ID NO: 11794 - RNA, 21 nt, Artificial Sequence
  SARM1 targeting guide sequence portion
gcaggaccuggggcucaggcc

SEQ ID NO: 11795 - RNA, 21 nt, Artificial Sequence
  SARM1 targeting guide sequence portion
gcaggcugugcuuacuuucaa

SEQ ID NO: 11796 - RNA, 21 nt, Artificial Sequence
  SARM1 targeting guide sequence portion
gcauguccucaggcaggaccu

SEQ ID NO: 11797 - RNA, 21 nt, Artificial Sequence
  SARM1 targeting guide sequence portion
gccacucgaagccaucaauga

SEQ ID NO: 11798 - RNA, 21 nt, Artificial Sequence
  SARM1 targeting guide sequence portion
gccaucaaugaugggcacaau

SEQ ID NO: 11799 - RNA, 21 nt, Artificial Sequence
  SARM1 targeting guide sequence portion
gcccaucauugauggcuucga

SEQ ID NO: 11800 - RNA, 21 nt, Artificial Sequence
  SARM1 targeting guide sequence portion
gccccagguccugccugagga

SEQ ID NO: 11801 - RNA, 21 nt, Artificial Sequence
  SARM1 targeting guide sequence portion
gccgcagcuuaaagcagucac

SEQ ID NO: 11802 - RNA, 21 nt, Artificial Sequence
  SARM1 targeting guide sequence portion
gccugagccccagguccugcc

SEQ ID NO: 11803 - RNA, 21 nt, Artificial Sequence
  SARM1 targeting guide sequence portion
gccugaggacaugcaggcugu

SEQ ID NO: 11804 - RNA, 21 nt, Artificial Sequence
  SARM1 targeting guide sequence portion
gccugcauguccucaggcagg

SEQ ID NO: 11805 - RNA, 21 nt, Artificial Sequence
  SARM1 targeting guide sequence portion
gcggcaagaacauugugccca

SEQ ID NO: 11806 - RNA, 21 nt, Artificial Sequence
  SARM1 targeting guide sequence portion
gcucacuugauaccguugaaa

SEQ ID NO: 11807 - RNA, 21 nt, Artificial Sequence
  SARM1 targeting guide sequence portion
gcucaggccacucgaagccau

SEQ ID NO: 11808 - RNA, 21 nt, Artificial Sequence
  SARM1 targeting guide sequence portion
gcugcggcaagaacauugugc

SEQ ID NO: 11809 - RNA, 21 nt, Artificial Sequence
  SARM1 targeting guide sequence portion
gcugugcuuacuuucaacggu

SEQ ID NO: 11810 - RNA, 21 nt, Artificial Sequence
  SARM1 targeting guide sequence portion
gcuuaaagcagucacaaucuc

SEQ ID NO: 11811 - RNA, 21 nt, Artificial Sequence
  SARM1 targeting guide sequence portion
gcuuacuuucaacgguaucaa

SEQ ID NO: 11812 - RNA, 21 nt, Artificial Sequence
  SARM1 targeting guide sequence portion
gcuucgaguggccugagcccc

SEQ ID NO: 11813 - RNA, 21 nt, Artificial Sequence
  SARM1 targeting guide sequence portion
gcuuuaagcugcggcaagaac

SEQ ID NO: 11814 - RNA, 21 nt, Artificial Sequence
  SARM1 targeting guide sequence portion
ggacaugcaggcugugcuuac

SEQ ID NO: 11815 - RNA, 21 nt, Artificial Sequence
  SARM1 targeting guide sequence portion
ggaccuggggcucaggccacu

SEQ ID NO: 11816 - RNA, 21 nt, Artificial Sequence
  SARM1 targeting guide sequence portion
ggagauugugacugcuuuaag

SEQ ID NO: 11817 - RNA, 21 nt, Artificial Sequence
  SARM1 targeting guide sequence portion
ggcaagaacauugugcccauc

SEQ ID NO: 11818 - RNA, 21 nt, Artificial Sequence
  SARM1 targeting guide sequence portion
ggcacaauguucuugccgcag

SEQ ID NO: 11819 - RNA, 21 nt, Artificial Sequence
  SARM1 targeting guide sequence portion
ggcaggaccuggggcucaggc

SEQ ID NO: 11820 - RNA, 21 nt, Artificial Sequence
  SARM1 targeting guide sequence portion
ggccacucgaagccaucaaug

SEQ ID NO: 11821 - RNA, 21 nt, Artificial Sequence
  SARM1 targeting guide sequence portion
ggccugagccccagguccugc

SEQ ID NO: 11822 - RNA, 21 nt, Artificial Sequence
  SARM1 targeting guide sequence portion
ggcucacuugauaccguugaa

SEQ ID NO: 11823 - RNA, 21 nt, Artificial Sequence
  SARM1 targeting guide sequence portion
ggcucaggccacucgaagcca

SEQ ID NO: 11824 - RNA, 21 nt, Artificial Sequence
  SARM1 targeting guide sequence portion
ggcugugcuuacuuucaacgg

SEQ ID NO: 11825 - RNA, 21 nt, Artificial Sequence
  SARM1 targeting guide sequence portion
ggcuucgaguggccugagccc

SEQ ID NO: 11826 - RNA, 21 nt, Artificial Sequence
  SARM1 targeting guide sequence portion
gggcacaauguucuugccgca

SEQ ID NO: 11827 - RNA, 21 nt, Artificial Sequence
  SARM1 targeting guide sequence portion
gggcucaggccacucgaagcc

SEQ ID NO: 11828 - RNA, 21 nt, Artificial Sequence
  SARM1 targeting guide sequence portion
ggggcucaggccacucgaagc

SEQ ID NO: 11829 - RNA, 21 nt, Artificial Sequence
  SARM1 targeting guide sequence portion
gguccugccugaggacaugca

SEQ ID NO: 11830 - RNA, 21 nt, Artificial Sequence
  SARM1 targeting guide sequence portion
guaagcacagccugcaugucc

SEQ ID NO: 11831 - RNA, 21 nt, Artificial Sequence
  SARM1 targeting guide sequence portion
guccucaggcaggaccugggg

SEQ ID NO: 11832 - RNA, 21 nt, Artificial Sequence
  SARM1 targeting guide sequence portion
guccugccugaggacaugcag

SEQ ID NO: 11833 - RNA, 21 nt, Artificial Sequence
  SARM1 targeting guide sequence portion
gugacugcuuuaagcugcggc

SEQ ID NO: 11834 - RNA, 21 nt, Artificial Sequence
  SARM1 targeting guide sequence portion
gugcccaucauugauggcuuc

SEQ ID NO: 11835 - RNA, 21 nt, Artificial Sequence
  SARM1 targeting guide sequence portion
gugcuuacuuucaacgguauc

SEQ ID NO: 11836 - RNA, 21 nt, Artificial Sequence
  SARM1 targeting guide sequence portion
guggccugagccccagguccu

SEQ ID NO: 11837 - RNA, 21 nt, Artificial Sequence
  SARM1 targeting guide sequence portion
guucuugccgcagcuuaaagc

SEQ ID NO: 11838 - RNA, 21 nt, Artificial Sequence
  SARM1 targeting guide sequence portion
guugaaaguaagcacagccug

SEQ ID NO: 11839 - RNA, 21 nt, Artificial Sequence
  SARM1 targeting guide sequence portion
uaagcacagccugcauguccu

SEQ ID NO: 11840 - RNA, 21 nt, Artificial Sequence
  SARM1 targeting guide sequence portion
uaagcugcggcaagaacauug

SEQ ID NO: 11841 - RNA, 21 nt, Artificial Sequence
  SARM1 targeting guide sequence portion
uaccguugaaaguaagcacag

SEQ ID NO: 11842 - RNA, 21 nt, Artificial Sequence
  SARM1 targeting guide sequence portion
ucaaugaugggcacaauguuc

SEQ ID NO: 11843 - RNA, 21 nt, Artificial Sequence
  SARM1 targeting guide sequence portion
ucacuugauaccguugaaagu

SEQ ID NO: 11844 - RNA, 21 nt, Artificial Sequence
  SARM1 targeting guide sequence portion
ucaggcaggaccuggggcuca

SEQ ID NO: 11845 - RNA, 21 nt, Artificial Sequence
  SARM1 targeting guide sequence portion
ucaggccacucgaagccauca

SEQ ID NO: 11846 - RNA, 21 nt, Artificial Sequence
  SARM1 targeting guide sequence portion
ucauugauggcuucgaguggc

SEQ ID NO: 11847 - RNA, 21 nt, Artificial Sequence
  SARM1 targeting guide sequence portion
uccaggagauugugacugcuu

SEQ ID NO: 11848 - RNA, 21 nt, Artificial Sequence
  SARM1 targeting guide sequence portion
uccucaggcaggaccuggggc

SEQ ID NO: 11849 - RNA, 21 nt, Artificial Sequence
  SARM1 targeting guide sequence portion
uccugccugaggacaugcagg

SEQ ID NO: 11850 - RNA, 21 nt, Artificial Sequence
  SARM1 targeting guide sequence portion
ucgaagccaucaaugaugggc

SEQ ID NO: 11851 - RNA, 21 nt, Artificial Sequence
  SARM1 targeting guide sequence portion
ucgaguggccugagccccagg

SEQ ID NO: 11852 - RNA, 21 nt, Artificial Sequence
  SARM1 targeting guide sequence portion
ucuccaggagauugugacugc

SEQ ID NO: 11853 - RNA, 21 nt, Artificial Sequence
  SARM1 targeting guide sequence portion
ucuugccgcagcuuaaagcag

SEQ ID NO: 11854 - RNA, 21 nt, Artificial Sequence
  SARM1 targeting guide sequence portion
ugaaaguaagcacagccugca

SEQ ID NO: 11855 - RNA, 21 nt, Artificial Sequence
  SARM1 targeting guide sequence portion
ugacugcuuuaagcugcggca

SEQ ID NO: 11856 - RNA, 21 nt, Artificial Sequence
  SARM1 targeting guide sequence portion
ugagccccagguccugccuga

SEQ ID NO: 11857 - RNA, 21 nt, Artificial Sequence
  SARM1 targeting guide sequence portion
ugaggacaugcaggcugugcu

SEQ ID NO: 11858 - RNA, 21 nt, Artificial Sequence
  SARM1 targeting guide sequence portion
ugauaccguugaaaguaagca

SEQ ID NO: 11859 - RNA, 21 nt, Artificial Sequence
  SARM1 targeting guide sequence portion
ugauggcuucgaguggccuga

SEQ ID NO: 11860 - RNA, 21 nt, Artificial Sequence
  SARM1 targeting guide sequence portion
ugaugggcacaauguucuugc

SEQ ID NO: 11861 - RNA, 21 nt, Artificial Sequence
  SARM1 targeting guide sequence portion
ugcaggcugugcuuacuuuca

SEQ ID NO: 11862 - RNA, 21 nt, Artificial Sequence
  SARM1 targeting guide sequence portion
ugcauguccucaggcaggacc

SEQ ID NO: 11863 - RNA, 21 nt, Artificial Sequence
  SARM1 targeting guide sequence portion
ugcccaucauugauggcuucg

SEQ ID NO: 11864 - RNA, 21 nt, Artificial Sequence
  SARM1 targeting guide sequence portion
ugccgcagcuuaaagcaguca

SEQ ID NO: 11865 - RNA, 21 nt, Artificial Sequence
  SARM1 targeting guide sequence portion
ugccugaggacaugcaggcug

SEQ ID NO: 11866 - RNA, 21 nt, Artificial Sequence
  SARM1 targeting guide sequence portion
ugcggcaagaacauugugccc

SEQ ID NO: 11867 - RNA, 21 nt, Artificial Sequence
  SARM1 targeting guide sequence portion
ugcuuacuuucaacgguauca

SEQ ID NO: 11868 - RNA, 21 nt, Artificial Sequence
  SARM1 targeting guide sequence portion
ugcuuuaagcugcggcaagaa

SEQ ID NO: 11869 - RNA, 21 nt, Artificial Sequence
  SARM1 targeting guide sequence portion
uggccugagccccagguccug

SEQ ID NO: 11870 - RNA, 21 nt, Artificial Sequence
  SARM1 targeting guide sequence portion
uggcuucgaguggccugagcc

SEQ ID NO: 11871 - RNA, 21 nt, Artificial Sequence
  SARM1 targeting guide sequence portion
ugggcacaauguucuugccgc

SEQ ID NO: 11872 - RNA, 21 nt, Artificial Sequence
  SARM1 targeting guide sequence portion
uggggcucaggccacucgaag

SEQ ID NO: 11873 - RNA, 21 nt, Artificial Sequence
  SARM1 targeting guide sequence portion
uguccucaggcaggaccuggg

SEQ ID NO: 11874 - RNA, 21 nt, Artificial Sequence
  SARM1 targeting guide sequence portion
ugugacugcuuuaagcugcgg

SEQ ID NO: 11875 - RNA, 21 nt, Artificial Sequence
  SARM1 targeting guide sequence portion
ugugcccaucauugauggcuu

SEQ ID NO: 11876 - RNA, 21 nt, Artificial Sequence
  SARM1 targeting guide sequence portion
ugugcuuacuuucaacgguau

SEQ ID NO: 11877 - RNA, 21 nt, Artificial Sequence
  SARM1 targeting guide sequence portion
uguucuugccgcagcuuaaag

SEQ ID NO: 11878 - RNA, 21 nt, Artificial Sequence
  SARM1 targeting guide sequence portion
uuaagcugcggcaagaacauu

SEQ ID NO: 11879 - RNA, 21 nt, Artificial Sequence
  SARM1 targeting guide sequence portion
uucgaguggccugagccccag

SEQ ID NO: 11880 - RNA, 21 nt, Artificial Sequence
  SARM1 targeting guide sequence portion
uucuugccgcagcuuaaagca

SEQ ID NO: 11881 - RNA, 21 nt, Artificial Sequence
  SARM1 targeting guide sequence portion
uugaaaguaagcacagccugc

SEQ ID NO: 11882 - RNA, 21 nt, Artificial Sequence
  SARM1 targeting guide sequence portion
uugauaccguugaaaguaagc

SEQ ID NO: 11883 - RNA, 21 nt, Artificial Sequence
  SARM1 targeting guide sequence portion
uugauggcuucgaguggccug

SEQ ID NO: 11884 - RNA, 21 nt, Artificial Sequence
  SARM1 targeting guide sequence portion
uugccgcagcuuaaagcaguc

SEQ ID NO: 11885 - RNA, 21 nt, Artificial Sequence
  SARM1 targeting guide sequence portion
uugugacugcuuuaagcugcg

SEQ ID NO: 11886 - RNA, 21 nt, Artificial Sequence
  SARM1 targeting guide sequence portion
uugugcccaucauugauggcu

SEQ ID NO: 11887 - RNA, 21 nt, Artificial Sequence
  SARM1 targeting guide sequence portion
uuuaagcugcggcaagaacau

SEQ ID NO: 11888 - RNA, 22 nt, Artificial Sequence
  SARM1 targeting guide sequence portion
aaaguaagcacagccugcaugu

SEQ ID NO: 11889 - RNA, 22 nt, Artificial Sequence
  SARM1 targeting guide sequence portion
aacauugugcccaucauugaug

SEQ ID NO: 11890 - RNA, 22 nt, Artificial Sequence
  SARM1 targeting guide sequence portion
aagaacauugugcccaucauug

SEQ ID NO: 11891 - RNA, 22 nt, Artificial Sequence
  SARM1 targeting guide sequence portion
aagcacagccugcauguccuca

SEQ ID NO: 11892 - RNA, 22 nt, Artificial Sequence
  SARM1 targeting guide sequence portion
aagccaucaaugaugggcacaa

SEQ ID NO: 11893 - RNA, 22 nt, Artificial Sequence
  SARM1 targeting guide sequence portion
aagcugcggcaagaacauugug

SEQ ID NO: 11894 - RNA, 22 nt, Artificial Sequence
  SARM1 targeting guide sequence portion
aaguaagcacagccugcauguc

SEQ ID NO: 11895 - RNA, 22 nt, Artificial Sequence
  SARM1 targeting guide sequence portion
aaugaugggcacaauguucuug

SEQ ID NO: 11896 - RNA, 22 nt, Artificial Sequence
  SARM1 targeting guide sequence portion
aauguucuugccgcagcuuaaa

SEQ ID NO: 11897 - RNA, 22 nt, Artificial Sequence
  SARM1 targeting guide sequence portion
acaauguucuugccgcagcuua

SEQ ID NO: 11898 - RNA, 22 nt, Artificial Sequence
  SARM1 targeting guide sequence portion
acagccugcauguccucaggca

SEQ ID NO: 11899 - RNA, 22 nt, Artificial Sequence
  SARM1 targeting guide sequence portion
acaugcaggcugugcuuacuuu

SEQ ID NO: 11900 - RNA, 22 nt, Artificial Sequence
  SARM1 targeting guide sequence portion
acauugugcccaucauugaugg

SEQ ID NO: 11901 - RNA, 22 nt, Artificial Sequence
  SARM1 targeting guide sequence portion
accguugaaaguaagcacagcc

SEQ ID NO: 11902 - RNA, 22 nt, Artificial Sequence
  SARM1 targeting guide sequence portion
accuggggcucaggccacucga

SEQ ID NO: 11903 - RNA, 22 nt, Artificial Sequence
  SARM1 targeting guide sequence portion
acucgaagccaucaaugauggg

SEQ ID NO: 11904 - RNA, 22 nt, Artificial Sequence
  SARM1 targeting guide sequence portion
acugcuuuaagcugcggcaaga

SEQ ID NO: 11905 - RNA, 22 nt, Artificial Sequence
  SARM1 targeting guide sequence portion
acuugauaccguugaaaguaag

SEQ ID NO: 11906 - RNA, 22 nt, Artificial Sequence
  SARM1 targeting guide sequence portion
agaacauugugcccaucauuga

SEQ ID NO: 11907 - RNA, 22 nt, Artificial Sequence
  SARM1 targeting guide sequence portion
agauugugacugcuuuaagcug

SEQ ID NO: 11908 - RNA, 22 nt, Artificial Sequence
  SARM1 targeting guide sequence portion
agcacagccugcauguccucag

SEQ ID NO: 11909 - RNA, 22 nt, Artificial Sequence
  SARM1 targeting guide sequence portion
agccaucaaugaugggcacaau

SEQ ID NO: 11910 - RNA, 22 nt, Artificial Sequence
  SARM1 targeting guide sequence portion
agccccagguccugccugagga

SEQ ID NO: 11911 - RNA, 22 nt, Artificial Sequence
  SARM1 targeting guide sequence portion
agccugcauguccucaggcagg

SEQ ID NO: 11912 - RNA, 22 nt, Artificial Sequence
  SARM1 targeting guide sequence portion
agcugcggcaagaacauugugc

SEQ ID NO: 11913 - RNA, 22 nt, Artificial Sequence
  SARM1 targeting guide sequence portion
agcuuaaagcagucacaaucuc

SEQ ID NO: 11914 - RNA, 22 nt, Artificial Sequence
  SARM1 targeting guide sequence portion
aggacaugcaggcugugcuuac

SEQ ID NO: 11915 - RNA, 22 nt, Artificial Sequence
  SARM1 targeting guide sequence portion
aggaccuggggcucaggccacu

SEQ ID NO: 11916 - RNA, 22 nt, Artificial Sequence
  SARM1 targeting guide sequence portion
aggagauugugacugcuuuaag

SEQ ID NO: 11917 - RNA, 22 nt, Artificial Sequence
  SARM1 targeting guide sequence portion
aggcaggaccuggggcucaggc

SEQ ID NO: 11918 - RNA, 22 nt, Artificial Sequence
  SARM1 targeting guide sequence portion
aggccacucgaagccaucaaug

SEQ ID NO: 11919 - RNA, 22 nt, Artificial Sequence
  SARM1 targeting guide sequence portion
aggcugugcuuacuuucaacgg

SEQ ID NO: 11920 - RNA, 22 nt, Artificial Sequence
  SARM1 targeting guide sequence portion
agguccugccugaggacaugca

SEQ ID NO: 11921 - RNA, 22 nt, Artificial Sequence
  SARM1 targeting guide sequence portion
aguaagcacagccugcaugucc

SEQ ID NO: 11922 - RNA, 22 nt, Artificial Sequence
  SARM1 targeting guide sequence portion
aguggccugagccccagguccu

SEQ ID NO: 11923 - RNA, 22 nt, Artificial Sequence
  SARM1 targeting guide sequence portion
auaccguugaaaguaagcacag

SEQ ID NO: 11924 - RNA, 22 nt, Artificial Sequence
  SARM1 targeting guide sequence portion
aucaaugaugggcacaauguuc

SEQ ID NO: 11925 - RNA, 22 nt, Artificial Sequence
  SARM1 targeting guide sequence portion
aucauugauggcuucgaguggc

SEQ ID NO: 11926 - RNA, 22 nt, Artificial Sequence
  SARM1 targeting guide sequence portion
augaugggcacaauguucuugc

SEQ ID NO: 11927 - RNA, 22 nt, Artificial Sequence
  SARM1 targeting guide sequence portion
augcaggcugugcuuacuuuca

SEQ ID NO: 11928 - RNA, 22 nt, Artificial Sequence
  SARM1 targeting guide sequence portion
auggcuucgaguggccugagcc

SEQ ID NO: 11929 - RNA, 22 nt, Artificial Sequence
  SARM1 targeting guide sequence portion
augggcacaauguucuugccgc

SEQ ID NO: 11930 - RNA, 22 nt, Artificial Sequence
  SARM1 targeting guide sequence portion
auguccucaggcaggaccuggg

SEQ ID NO: 11931 - RNA, 22 nt, Artificial Sequence
  SARM1 targeting guide sequence portion
auguucuugccgcagcuuaaag

SEQ ID NO: 11932 - RNA, 22 nt, Artificial Sequence
  SARM1 targeting guide sequence portion
auugauggcuucgaguggccug

SEQ ID NO: 11933 - RNA, 22 nt, Artificial Sequence
  SARM1 targeting guide sequence portion
auugugacugcuuuaagcugcg

SEQ ID NO: 11934 - RNA, 22 nt, Artificial Sequence
  SARM1 targeting guide sequence portion
auugugcccaucauugauggcu

SEQ ID NO: 11935 - RNA, 22 nt, Artificial Sequence
  SARM1 targeting guide sequence portion
caagaacauugugcccaucauu

SEQ ID NO: 11936 - RNA, 22 nt, Artificial Sequence
  SARM1 targeting guide sequence portion
caaugaugggcacaauguucuu

SEQ ID NO: 11937 - RNA, 22 nt, Artificial Sequence
  SARM1 targeting guide sequence portion
caauguucuugccgcagcuuaa

SEQ ID NO: 11938 - RNA, 22 nt, Artificial Sequence
  SARM1 targeting guide sequence portion
cacaauguucuugccgcagcuu

SEQ ID NO: 11939 - RNA, 22 nt, Artificial Sequence
  SARM1 targeting guide sequence portion
cacagccugcauguccucaggc

SEQ ID NO: 11940 - RNA, 22 nt, Artificial Sequence
  SARM1 targeting guide sequence portion
cacucgaagccaucaaugaugg

SEQ ID NO: 11941 - RNA, 22 nt, Artificial Sequence
  SARM1 targeting guide sequence portion
cacuugauaccguugaaaguaa

SEQ ID NO: 11942 - RNA, 22 nt, Artificial Sequence
  SARM1 targeting guide sequence portion
cagccugcauguccucaggcag

SEQ ID NO: 11943 - RNA, 22 nt, Artificial Sequence
  SARM1 targeting guide sequence portion
cagcuuaaagcagucacaaucu

SEQ ID NO: 11944 - RNA, 22 nt, Artificial Sequence
  SARM1 targeting guide sequence portion
caggaccuggggcucaggccac

SEQ ID NO: 11945 - RNA, 22 nt, Artificial Sequence
  SARM1 targeting guide sequence portion
caggagauugugacugcuuuaa

SEQ ID NO: 11946 - RNA, 22 nt, Artificial Sequence
  SARM1 targeting guide sequence portion
caggcaggaccuggggcucagg

SEQ ID NO: 11947 - RNA, 22 nt, Artificial Sequence
  SARM1 targeting guide sequence portion
caggccacucgaagccaucaau

SEQ ID NO: 11948 - RNA, 22 nt, Artificial Sequence
  SARM1 targeting guide sequence portion
caggcugugcuuacuuucaacg

SEQ ID NO: 11949 - RNA, 22 nt, Artificial Sequence
  SARM1 targeting guide sequence portion
cagguccugccugaggacaugc

SEQ ID NO: 11950 - RNA, 22 nt, Artificial Sequence
  SARM1 targeting guide sequence portion
caucaaugaugggcacaauguu

SEQ ID NO: 11951 - RNA, 22 nt, Artificial Sequence
  SARM1 targeting guide sequence portion
caucauugauggcuucgagugg

SEQ ID NO: 11952 - RNA, 22 nt, Artificial Sequence
  SARM1 targeting guide sequence portion
caugcaggcugugcuuacuuuc

SEQ ID NO: 11953 - RNA, 22 nt, Artificial Sequence
  SARM1 targeting guide sequence portion
cauguccucaggcaggaccugg

SEQ ID NO: 11954 - RNA, 22 nt, Artificial Sequence
  SARM1 targeting guide sequence portion
cauugauggcuucgaguggccu

SEQ ID NO: 11955 - RNA, 22 nt, Artificial Sequence
  SARM1 targeting guide sequence portion
cauugugcccaucauugauggc

SEQ ID NO: 11956 - RNA, 22 nt, Artificial Sequence
  SARM1 targeting guide sequence portion
ccacucgaagccaucaaugaug

SEQ ID NO: 11957 - RNA, 22 nt, Artificial Sequence
  SARM1 targeting guide sequence portion
ccaggagauugugacugcuuua

SEQ ID NO: 11958 - RNA, 22 nt, Artificial Sequence
  SARM1 targeting guide sequence portion
ccagguccugccugaggacaug

SEQ ID NO: 11959 - RNA, 22 nt, Artificial Sequence
  SARM1 targeting guide sequence portion
ccaucaaugaugggcacaaugu

SEQ ID NO: 11960 - RNA, 22 nt, Artificial Sequence
  SARM1 targeting guide sequence portion
ccaucauugauggcuucgagug

SEQ ID NO: 11961 - RNA, 22 nt, Artificial Sequence
  SARM1 targeting guide sequence portion
cccagguccugccugaggacau

SEQ ID NO: 11962 - RNA, 22 nt, Artificial Sequence
  SARM1 targeting guide sequence portion
cccaucauugauggcuucgagu

SEQ ID NO: 11963 - RNA, 22 nt, Artificial Sequence
  SARM1 targeting guide sequence portion
ccccagguccugccugaggaca

SEQ ID NO: 11964 - RNA, 22 nt, Artificial Sequence
  SARM1 targeting guide sequence portion
ccgcagcuuaaagcagucacaa

SEQ ID NO: 11965 - RNA, 22 nt, Artificial Sequence
  SARM1 targeting guide sequence portion
ccguugaaaguaagcacagccu

SEQ ID NO: 11966 - RNA, 22 nt, Artificial Sequence
  SARM1 targeting guide sequence portion
ccucaggcaggaccuggggcuc

SEQ ID NO: 11967 - RNA, 22 nt, Artificial Sequence
  SARM1 targeting guide sequence portion
ccugagccccagguccugccug

SEQ ID NO: 11968 - RNA, 22 nt, Artificial Sequence
  SARM1 targeting guide sequence portion
ccugaggacaugcaggcugugc

SEQ ID NO: 11969 - RNA, 22 nt, Artificial Sequence
  SARM1 targeting guide sequence portion
ccugcauguccucaggcaggac

SEQ ID NO: 11970 - RNA, 22 nt, Artificial Sequence
  SARM1 targeting guide sequence portion
ccugccugaggacaugcaggcu

SEQ ID NO: 11971 - RNA, 22 nt, Artificial Sequence
  SARM1 targeting guide sequence portion
ccuggggcucaggccacucgaa

SEQ ID NO: 11972 - RNA, 22 nt, Artificial Sequence
  SARM1 targeting guide sequence portion
cgaagccaucaaugaugggcac

SEQ ID NO: 11973 - RNA, 22 nt, Artificial Sequence
  SARM1 targeting guide sequence portion
cgaguggccugagccccagguc

SEQ ID NO: 11974 - RNA, 22 nt, Artificial Sequence
  SARM1 targeting guide sequence portion
cgcagcuuaaagcagucacaau

SEQ ID NO: 11975 - RNA, 22 nt, Artificial Sequence
  SARM1 targeting guide sequence portion
cggcaagaacauugugcccauc

SEQ ID NO: 11976 - RNA, 22 nt, Artificial Sequence
  SARM1 targeting guide sequence portion
cguugaaaguaagcacagccug

SEQ ID NO: 11977 - RNA, 22 nt, Artificial Sequence
  SARM1 targeting guide sequence portion
cucacuugauaccguugaaagu

SEQ ID NO: 11978 - RNA, 22 nt, Artificial Sequence
  SARM1 targeting guide sequence portion
cucaggcaggaccuggggcuca

SEQ ID NO: 11979 - RNA, 22 nt, Artificial Sequence
  SARM1 targeting guide sequence portion
cucaggccacucgaagccauca

SEQ ID NO: 11980 - RNA, 22 nt, Artificial Sequence
  SARM1 targeting guide sequence portion
cuccaggagauugugacugcuu

SEQ ID NO: 11981 - RNA, 22 nt, Artificial Sequence
  SARM1 targeting guide sequence portion
cucgaagccaucaaugaugggc

SEQ ID NO: 11982 - RNA, 22 nt, Artificial Sequence
  SARM1 targeting guide sequence portion
cugagccccagguccugccuga

SEQ ID NO: 11983 - RNA, 22 nt, Artificial Sequence
  SARM1 targeting guide sequence portion
cugaggacaugcaggcugugcu

SEQ ID NO: 11984 - RNA, 22 nt, Artificial Sequence
  SARM1 targeting guide sequence portion
cugcauguccucaggcaggacc

SEQ ID NO: 11985 - RNA, 22 nt, Artificial Sequence
  SARM1 targeting guide sequence portion
cugccugaggacaugcaggcug

SEQ ID NO: 11986 - RNA, 22 nt, Artificial Sequence
  SARM1 targeting guide sequence portion
cugcggcaagaacauugugccc

SEQ ID NO: 11987 - RNA, 22 nt, Artificial Sequence
  SARM1 targeting guide sequence portion
cugcuuuaagcugcggcaagaa

SEQ ID NO: 11988 - RNA, 22 nt, Artificial Sequence
  SARM1 targeting guide sequence portion
cuggggcucaggccacucgaag

SEQ ID NO: 11989 - RNA, 22 nt, Artificial Sequence
  SARM1 targeting guide sequence portion
cugugcuuacuuucaacgguau

SEQ ID NO: 11990 - RNA, 22 nt, Artificial Sequence
  SARM1 targeting guide sequence portion
cuucgaguggccugagccccag

SEQ ID NO: 11991 - RNA, 22 nt, Artificial Sequence
  SARM1 targeting guide sequence portion
cuugauaccguugaaaguaagc

SEQ ID NO: 11992 - RNA, 22 nt, Artificial Sequence
  SARM1 targeting guide sequence portion
cuugccgcagcuuaaagcaguc

SEQ ID NO: 11993 - RNA, 22 nt, Artificial Sequence
  SARM1 targeting guide sequence portion
cuuuaagcugcggcaagaacau

SEQ ID NO: 11994 - RNA, 22 nt, Artificial Sequence
  SARM1 targeting guide sequence portion
gaaaguaagcacagccugcaug

SEQ ID NO: 11995 - RNA, 22 nt, Artificial Sequence
  SARM1 targeting guide sequence portion
gaacauugugcccaucauugau

SEQ ID NO: 11996 - RNA, 22 nt, Artificial Sequence
  SARM1 targeting guide sequence portion
gaagccaucaaugaugggcaca

SEQ ID NO: 11997 - RNA, 22 nt, Artificial Sequence
  SARM1 targeting guide sequence portion
gacaugcaggcugugcuuacuu

SEQ ID NO: 11998 - RNA, 22 nt, Artificial Sequence
  SARM1 targeting guide sequence portion
gaccuggggcucaggccacucg

SEQ ID NO: 11999 - RNA, 22 nt, Artificial Sequence
  SARM1 targeting guide sequence portion
gacugcuuuaagcugcggcaag

SEQ ID NO: 12000 - RNA, 22 nt, Artificial Sequence
  SARM1 targeting guide sequence portion
gagauugugacugcuuuaagcu

SEQ ID NO: 12001 - RNA, 22 nt, Artificial Sequence
  SARM1 targeting guide sequence portion
gagccccagguccugccugagg

SEQ ID NO: 12002 - RNA, 22 nt, Artificial Sequence
  SARM1 targeting guide sequence portion
gaggacaugcaggcugugcuua

SEQ ID NO: 12003 - RNA, 22 nt, Artificial Sequence
  SARM1 targeting guide sequence portion
gaguggccugagccccaggucc

SEQ ID NO: 12004 - RNA, 22 nt, Artificial Sequence
  SARM1 targeting guide sequence portion
gauaccguugaaaguaagcaca

SEQ ID NO: 12005 - RNA, 22 nt, Artificial Sequence
  SARM1 targeting guide sequence portion
gauggcuucgaguggccugagc

SEQ ID NO: 12006 - RNA, 22 nt, Artificial Sequence
  SARM1 targeting guide sequence portion
gaugggcacaauguucuugccg

SEQ ID NO: 12007 - RNA, 22 nt, Artificial Sequence
  SARM1 targeting guide sequence portion
gauugugacugcuuuaagcugc

SEQ ID NO: 12008 - RNA, 22 nt, Artificial Sequence
  SARM1 targeting guide sequence portion
gcaagaacauugugcccaucau

SEQ ID NO: 12009 - RNA, 22 nt, Artificial Sequence
  SARM1 targeting guide sequence portion
gcacaauguucuugccgcagcu

SEQ ID NO: 12010 - RNA, 22 nt, Artificial Sequence
  SARM1 targeting guide sequence portion
gcacagccugcauguccucagg

SEQ ID NO: 12011 - RNA, 22 nt, Artificial Sequence
  SARM1 targeting guide sequence portion
gcagcuuaaagcagucacaauc

SEQ ID NO: 12012 - RNA, 22 nt, Artificial Sequence
  SARM1 targeting guide sequence portion
gcaggaccuggggcucaggcca

SEQ ID NO: 12013 - RNA, 22 nt, Artificial Sequence
  SARM1 targeting guide sequence portion
gcaggcugugcuuacuuucaac

SEQ ID NO: 12014 - RNA, 22 nt, Artificial Sequence
  SARM1 targeting guide sequence portion
gcauguccucaggcaggaccug

SEQ ID NO: 12015 - RNA, 22 nt, Artificial Sequence
  SARM1 targeting guide sequence portion
gccacucgaagccaucaaugau

SEQ ID NO: 12016 - RNA, 22 nt, Artificial Sequence
  SARM1 targeting guide sequence portion
gccaucaaugaugggcacaaug

SEQ ID NO: 12017 - RNA, 22 nt, Artificial Sequence
  SARM1 targeting guide sequence portion
gcccaucauugauggcuucgag

SEQ ID NO: 12018 - RNA, 22 nt, Artificial Sequence
  SARM1 targeting guide sequence portion
gccccagguccugccugaggac

SEQ ID NO: 12019 - RNA, 22 nt, Artificial Sequence
  SARM1 targeting guide sequence portion
gccgcagcuuaaagcagucaca

SEQ ID NO: 12020 - RNA, 22 nt, Artificial Sequence
  SARM1 targeting guide sequence portion
gccugagccccagguccugccu

SEQ ID NO: 12021 - RNA, 22 nt, Artificial Sequence
  SARM1 targeting guide sequence portion
gccugaggacaugcaggcugug

SEQ ID NO: 12022 - RNA, 22 nt, Artificial Sequence
  SARM1 targeting guide sequence portion
gccugcauguccucaggcagga

SEQ ID NO: 12023 - RNA, 22 nt, Artificial Sequence
  SARM1 targeting guide sequence portion
gcggcaagaacauugugcccau

SEQ ID NO: 12024 - RNA, 22 nt, Artificial Sequence
  SARM1 targeting guide sequence portion
gcucacuugauaccguugaaag

SEQ ID NO: 12025 - RNA, 22 nt, Artificial Sequence
  SARM1 targeting guide sequence portion
gcucaggccacucgaagccauc

SEQ ID NO: 12026 - RNA, 22 nt, Artificial Sequence
  SARM1 targeting guide sequence portion
gcugcggcaagaacauugugcc

SEQ ID NO: 12027 - RNA, 22 nt, Artificial Sequence
  SARM1 targeting guide sequence portion
gcugugcuuacuuucaacggua

SEQ ID NO: 12028 - RNA, 22 nt, Artificial Sequence
  SARM1 targeting guide sequence portion
gcuuaaagcagucacaaucucc

SEQ ID NO: 12029 - RNA, 22 nt, Artificial Sequence
  SARM1 targeting guide sequence portion
gcuuacuuucaacgguaucaag

SEQ ID NO: 12030 - RNA, 22 nt, Artificial Sequence
  SARM1 targeting guide sequence portion
gcuucgaguggccugagcccca

SEQ ID NO: 12031 - RNA, 22 nt, Artificial Sequence
  SARM1 targeting guide sequence portion
gcuuuaagcugcggcaagaaca

SEQ ID NO: 12032 - RNA, 22 nt, Artificial Sequence
  SARM1 targeting guide sequence portion
ggacaugcaggcugugcuuacu

SEQ ID NO: 12033 - RNA, 22 nt, Artificial Sequence
  SARM1 targeting guide sequence portion
ggaccuggggcucaggccacuc

SEQ ID NO: 12034 - RNA, 22 nt, Artificial Sequence
  SARM1 targeting guide sequence portion
ggagauugugacugcuuuaagc

SEQ ID NO: 12035 - RNA, 22 nt, Artificial Sequence
  SARM1 targeting guide sequence portion
ggcaagaacauugugcccauca

SEQ ID NO: 12036 - RNA, 22 nt, Artificial Sequence
  SARM1 targeting guide sequence portion
ggcacaauguucuugccgcagc

SEQ ID NO: 12037 - RNA, 22 nt, Artificial Sequence
  SARM1 targeting guide sequence portion
ggcaggaccuggggcucaggcc

SEQ ID NO: 12038 - RNA, 22 nt, Artificial Sequence
  SARM1 targeting guide sequence portion
ggccacucgaagccaucaauga

SEQ ID NO: 12039 - RNA, 22 nt, Artificial Sequence
  SARM1 targeting guide sequence portion
ggccugagccccagguccugcc

SEQ ID NO: 12040 - RNA, 22 nt, Artificial Sequence
  SARM1 targeting guide sequence portion
ggcucacuugauaccguugaaa

SEQ ID NO: 12041 - RNA, 22 nt, Artificial Sequence
  SARM1 targeting guide sequence portion
ggcucaggccacucgaagccau

SEQ ID NO: 12042 - RNA, 22 nt, Artificial Sequence
  SARM1 targeting guide sequence portion
ggcugugcuuacuuucaacggu

SEQ ID NO: 12043 - RNA, 22 nt, Artificial Sequence
  SARM1 targeting guide sequence portion
ggcuucgaguggccugagcccc

SEQ ID NO: 12044 - RNA, 22 nt, Artificial Sequence
  SARM1 targeting guide sequence portion
gggcacaauguucuugccgcag

SEQ ID NO: 12045 - RNA, 22 nt, Artificial Sequence
  SARM1 targeting guide sequence portion
gggcucaggccacucgaagcca

SEQ ID NO: 12046 - RNA, 22 nt, Artificial Sequence
  SARM1 targeting guide sequence portion
ggggcucaggccacucgaagcc

SEQ ID NO: 12047 - RNA, 22 nt, Artificial Sequence
  SARM1 targeting guide sequence portion
gguccugccugaggacaugcag

SEQ ID NO: 12048 - RNA, 22 nt, Artificial Sequence
  SARM1 targeting guide sequence portion
guaagcacagccugcauguccu

SEQ ID NO: 12049 - RNA, 22 nt, Artificial Sequence
  SARM1 targeting guide sequence portion
guccucaggcaggaccuggggc

SEQ ID NO: 12050 - RNA, 22 nt, Artificial Sequence
  SARM1 targeting guide sequence portion
guccugccugaggacaugcagg

SEQ ID NO: 12051 - RNA, 22 nt, Artificial Sequence
  SARM1 targeting guide sequence portion
gugacugcuuuaagcugcggca

SEQ ID NO: 12052 - RNA, 22 nt, Artificial Sequence
  SARM1 targeting guide sequence portion
gugcccaucauugauggcuucg

SEQ ID NO: 12053 - RNA, 22 nt, Artificial Sequence
  SARM1 targeting guide sequence portion
gugcuuacuuucaacgguauca

SEQ ID NO: 12054 - RNA, 22 nt, Artificial Sequence
  SARM1 targeting guide sequence portion
guggccugagccccagguccug

SEQ ID NO: 12055 - RNA, 22 nt, Artificial Sequence
  SARM1 targeting guide sequence portion
guucuugccgcagcuuaaagca

SEQ ID NO: 12056 - RNA, 22 nt, Artificial Sequence
  SARM1 targeting guide sequence portion
guugaaaguaagcacagccugc

SEQ ID NO: 12057 - RNA, 22 nt, Artificial Sequence
  SARM1 targeting guide sequence portion
uaagcacagccugcauguccuc

SEQ ID NO: 12058 - RNA, 22 nt, Artificial Sequence
  SARM1 targeting guide sequence portion
uaagcugcggcaagaacauugu

SEQ ID NO: 12059 - RNA, 22 nt, Artificial Sequence
  SARM1 targeting guide sequence portion
uaccguugaaaguaagcacagc

SEQ ID NO: 12060 - RNA, 22 nt, Artificial Sequence
  SARM1 targeting guide sequence portion
ucaaugaugggcacaauguucu

SEQ ID NO: 12061 - RNA, 22 nt, Artificial Sequence
  SARM1 targeting guide sequence portion
ucacuugauaccguugaaagua

SEQ ID NO: 12062 - RNA, 22 nt, Artificial Sequence
  SARM1 targeting guide sequence portion
ucaggcaggaccuggggcucag

SEQ ID NO: 12063 - RNA, 22 nt, Artificial Sequence
  SARM1 targeting guide sequence portion
ucaggccacucgaagccaucaa

SEQ ID NO: 12064 - RNA, 22 nt, Artificial Sequence
  SARM1 targeting guide sequence portion
ucauugauggcuucgaguggcc

SEQ ID NO: 12065 - RNA, 22 nt, Artificial Sequence
  SARM1 targeting guide sequence portion
uccaggagauugugacugcuuu

SEQ ID NO: 12066 - RNA, 22 nt, Artificial Sequence
  SARM1 targeting guide sequence portion
uccucaggcaggaccuggggcu

SEQ ID NO: 12067 - RNA, 22 nt, Artificial Sequence
  SARM1 targeting guide sequence portion
uccugccugaggacaugcaggc

SEQ ID NO: 12068 - RNA, 22 nt, Artificial Sequence
  SARM1 targeting guide sequence portion
ucgaagccaucaaugaugggca

SEQ ID NO: 12069 - RNA, 22 nt, Artificial Sequence
  SARM1 targeting guide sequence portion
ucgaguggccugagccccaggu

SEQ ID NO: 12070 - RNA, 22 nt, Artificial Sequence
  SARM1 targeting guide sequence portion
ucuccaggagauugugacugcu

SEQ ID NO: 12071 - RNA, 22 nt, Artificial Sequence
  SARM1 targeting guide sequence portion
ucuugccgcagcuuaaagcagu

SEQ ID NO: 12072 - RNA, 22 nt, Artificial Sequence
  SARM1 targeting guide sequence portion
ugaaaguaagcacagccugcau

SEQ ID NO: 12073 - RNA, 22 nt, Artificial Sequence
  SARM1 targeting guide sequence portion
ugacugcuuuaagcugcggcaa

SEQ ID NO: 12074 - RNA, 22 nt, Artificial Sequence
  SARM1 targeting guide sequence portion
ugagccccagguccugccugag

SEQ ID NO: 12075 - RNA, 22 nt, Artificial Sequence
  SARM1 targeting guide sequence portion
ugaggacaugcaggcugugcuu

SEQ ID NO: 12076 - RNA, 22 nt, Artificial Sequence
  SARM1 targeting guide sequence portion
ugauaccguugaaaguaagcac

SEQ ID NO: 12077 - RNA, 22 nt, Artificial Sequence
  SARM1 targeting guide sequence portion
ugauggcuucgaguggccugag

SEQ ID NO: 12078 - RNA, 22 nt, Artificial Sequence
  SARM1 targeting guide sequence portion
ugaugggcacaauguucuugcc

SEQ ID NO: 12079 - RNA, 22 nt, Artificial Sequence
  SARM1 targeting guide sequence portion
ugcaggcugugcuuacuuucaa

SEQ ID NO: 12080 - RNA, 22 nt, Artificial Sequence
  SARM1 targeting guide sequence portion
ugcauguccucaggcaggaccu

SEQ ID NO: 12081 - RNA, 22 nt, Artificial Sequence
  SARM1 targeting guide sequence portion
ugcccaucauugauggcuucga

SEQ ID NO: 12082 - RNA, 22 nt, Artificial Sequence
  SARM1 targeting guide sequence portion
ugccgcagcuuaaagcagucac

SEQ ID NO: 12083 - RNA, 22 nt, Artificial Sequence
  SARM1 targeting guide sequence portion
ugccugaggacaugcaggcugu

SEQ ID NO: 12084 - RNA, 22 nt, Artificial Sequence
  SARM1 targeting guide sequence portion
ugcggcaagaacauugugccca

SEQ ID NO: 12085 - RNA, 22 nt, Artificial Sequence
  SARM1 targeting guide sequence portion
ugcuuacuuucaacgguaucaa

SEQ ID NO: 12086 - RNA, 22 nt, Artificial Sequence
  SARM1 targeting guide sequence portion
ugcuuuaagcugcggcaagaac

SEQ ID NO: 12087 - RNA, 22 nt, Artificial Sequence
  SARM1 targeting guide sequence portion
uggccugagccccagguccugc

SEQ ID NO: 12088 - RNA, 22 nt, Artificial Sequence
  SARM1 targeting guide sequence portion
uggcuucgaguggccugagccc

SEQ ID NO: 12089 - RNA, 22 nt, Artificial Sequence
  SARM1 targeting guide sequence portion
ugggcacaauguucuugccgca

SEQ ID NO: 12090 - RNA, 22 nt, Artificial Sequence
  SARM1 targeting guide sequence portion
uggggcucaggccacucgaagc

SEQ ID NO: 12091 - RNA, 22 nt, Artificial Sequence
  SARM1 targeting guide sequence portion
uguccucaggcaggaccugggg

SEQ ID NO: 12092 - RNA, 22 nt, Artificial Sequence
  SARM1 targeting guide sequence portion
ugugacugcuuuaagcugcggc

SEQ ID NO: 12093 - RNA, 22 nt, Artificial Sequence
  SARM1 targeting guide sequence portion
ugugcccaucauugauggcuuc

SEQ ID NO: 12094 - RNA, 22 nt, Artificial Sequence
  SARM1 targeting guide sequence portion
ugugcuuacuuucaacgguauc

SEQ ID NO: 12095 - RNA, 22 nt, Artificial Sequence
  SARM1 targeting guide sequence portion
uguucuugccgcagcuuaaagc

SEQ ID NO: 12096 - RNA, 22 nt, Artificial Sequence
  SARM1 targeting guide sequence portion
uuaagcugcggcaagaacauug

SEQ ID NO: 12097 - RNA, 22 nt, Artificial Sequence
  SARM1 targeting guide sequence portion
uucgaguggccugagccccagg

SEQ ID NO: 12098 - RNA, 22 nt, Artificial Sequence
  SARM1 targeting guide sequence portion
uucuugccgcagcuuaaagcag

SEQ ID NO: 12099 - RNA, 22 nt, Artificial Sequence
  SARM1 targeting guide sequence portion
uugaaaguaagcacagccugca

SEQ ID NO: 12100 - RNA, 22 nt, Artificial Sequence
  SARM1 targeting guide sequence portion
uugauaccguugaaaguaagca

SEQ ID NO: 12101 - RNA, 22 nt, Artificial Sequence
  SARM1 targeting guide sequence portion
uugauggcuucgaguggccuga

SEQ ID NO: 12102 - RNA, 22 nt, Artificial Sequence
  SARM1 targeting guide sequence portion
uugccgcagcuuaaagcaguca

SEQ ID NO: 12103 - RNA, 22 nt, Artificial Sequence
  SARM1 targeting guide sequence portion
uugugacugcuuuaagcugcgg

SEQ ID NO: 12104 - RNA, 22 nt, Artificial Sequence
  SARM1 targeting guide sequence portion
uugugcccaucauugauggcuu

SEQ ID NO: 12105 - RNA, 22 nt, Artificial Sequence
  SARM1 targeting guide sequence portion
uuuaagcugcggcaagaacauu

SEQ ID NO: 12106 - RNA, 20 nt, Artificial Sequence
  Example RNA guide sequence portion
aaaaaaauguacuugguucc

SEQ ID NO: 12107 - RNA, 17 nt, Artificial Sequence
  17 nucleotide guide sequence 1
aaaauguacuugguucc

SEQ ID NO: 12108 - RNA, 17 nt, Artificial Sequence
  17 nucleotide guide sequence 2
aaaaauguacuugguuc

SEQ ID NO: 12109 - RNA, 17 nt, Artificial Sequence
  17 nucleotide guide sequence 3
aaaaaauguacuugguu

SEQ ID NO: 12110 - RNA, 17 nt, Artificial Sequence
  17 nucleotide guide sequence 4
aaaaaaauguacuuggu

SEQ ID NO: 12111 - RNA, 20 nt, Artificial Sequence
  g2 mouse
gcgcuugcuggagcagaucc

SEQ ID NO: 12112 - RNA, 20 nt, Artificial Sequence
  g6 mouse
gcgaacugcgcgcugcacgg

SEQ ID NO: 12113 - RNA, 20 nt, Artificial Sequence
  g7 mouse
agcgagcgggaagagccacu

SEQ ID NO: 12114 - RNA, 20 nt, Artificial Sequence
  g8 mouse
uauccagagccugaaacgcc

SEQ ID NO: 12115 - RNA, 20 nt, Artificial Sequence
  g13 mouse
cucugacacgcggugcagca

SEQ ID NO: 12116 - RNA, 20 nt, Artificial Sequence
  g14 mouse
cauuccccgcugcccuguac

SEQ ID NO: 12117 - RNA, 20 nt, Artificial Sequence
  g17 mouse
aaggugcaccugcagcuuca

SEQ ID NO: 12118 - RNA, 20 nt, Artificial Sequence
  g18 mouse
caugcaggaccaugacugca

SEQ ID NO: 12119 - protein, 1370 aa, Artificial Sequence
  OMNI-50 CRISPR nuclease
MTKVKDYYIGLDIGTSSVGWAVTDEAYNVLKFNSKKMWGVRLFDDAKTAEERRGQRGARRRLDRKKERLSLLQDFFAEEVAKVDPNFFLRLDNSDLYMEDKDQKLKSKYTLFNDKDFKDKNFHKKYPTIHHLLMDLIEDDSKKDIRLVYLACHYLLKNRGHFIFEGQKFDTKSSFENSLNELKVHLNDEYGLDLEFDNENLINILTDPKLNKTAKKKELKSVIGDTKFLKAVSAIMIGSSQKLVDLFENPEDFDDSAIKSVDFSTTSFDDKYSDYELALGDKIALVNILKEIYDSSILENLLKEADKSKDGNKYISNAFVKKYNKHGQDLKEFKRLVRQYHKSAYFDIFRSEKVNDNYVSYTKSSISNNKRVKANKFTDQEAFYKFAKKHLETIKYKINKVNGSKADLELIDGMLRDMEFKNFMPKIKSSDNGVIPYQLKLMELNKILENQSKHHEFLNVSDEYGSVCDKIASIMEFRIPYYVGPLNPNSKYAWIKKQKDSEITPWNFKDVVDLDSSREEFIDSLIGRCTYLKDEKVLPKASLLYNEYMVLNELNNLKLNDLPITEEMKKKIFDQLFKTRKKVTLKAVANLLKKEFNINGEILLSGTDGDFKQGLNSYNDFKAIVGDKVDSDDYRDKIEEIIKLIVLYGDDKSYLQKKIKAGYGKYFTDSEIKKMAGLNYKDWGRLSKKLLTGLEGANKITGERGSIIHFMREYNLNLMELMSASFTFTEEIQKLNPVDDRKLSYEMVDELYLSPSVKRMLWQSLRIVDEIKNIMGTDSKKIFIEMARGKEEVKARKESRKNQLLKFYKDGKKAFISEIGEERYSYLLSEIEGEEENKFRWDNLYLYYTQLGRCMYSLEPIDISELSSKNIYDQDHIYPKSKIYDDSIENRVLVKKDLNSKKGNSYPIPDEILNKNCYAYWKILYDKGLIGQKKYTRLTRRTGFTDDELVQFISRQIVETRQATKETANLLKTICKNSEIVYSKAENASRFRQEFDIVKCRAVNDLHHMHDAYINIIVGNVYNTKFTKDPMNFVKKQEKARSYNLENMFKYDVKRGGYTAWIADDEKGTVKNASIKRIRKELEGTNYRFTRMNYIESGALFNATLQRKNKGSRPLKDKGPKSSIEKYGGYTNINKACFAVLDIKSKNKIERKLMPVEREIYAKQKNDKKLSDEIFSKYLKDRFGIEDYRVVYPVVKMRTLLKIDGSYYFITGGSDKTLELRSALQLILPKKNEWAIKQIDKSSENDYLTIERIQDLTEELVYNTFDIIVNKFKTSVFKKSFLNLFQDDKIENIDFKFKSMDFKEKCKTLLMLVKAIRASGVRQDLKSIDLKSDYGRLSSKTNNIGNYQEFKIINQSITGLFENEVDLLKL

SEQ ID NO: 12120 - protein, 1062 aa, Artificial Sequence
  OMNI-79 CRISPR nuclease
MEKRLGLDIGTNSIGWCLYEGDSILDIGVRIFSDGRDPKSGASLAVDRRNARAMRRRRDRYLGRRSALIKALKAHGLFPAEQDAAKALEREDPYSLRVRALDHRLDPHQIGRAIFHLNQRRGFRSNRKADRVLGDQESGLISTATRVLDEAMAKSGARTLGEFLASRDTRRVRMRPDVKGYDFYPNRQHYLEEFEKIWDAQSQYHPDLLSQQAKSAIHRIIFHQRPLKPQAVGTCTFAGLHGIPGDETRLPKAHPLFQQRRLYEEVNQLEIVCASAPARKLTRDERDALILKLQDKKKVTFSTLARTIRLKEGERFNKESENRKDLAGDEVRAEMSDKTRFGRRWFHLSLDEQWSVIDRLLNEESTEDLLAWLEKEWSLPSDVAEAVANAHLPDGHGRFGLTATVRLLEHLKADVVTYAEAARRAGFHHSDFRDGACYDELPYYGEILSREIAPGKDEYGDPLERQWGKITNPTVHIGLNQLRRLINALVRRHGRPDFIFVELARELKLNEKQKADHKRRIKQTTDAARARAEKLREIGQRDSGSNRMLLRIWEELNPSNPLDRRCPYCAEPISIEMLMSGSADIDHIVPYSRCLDDSAANKVVAHNHCNRQKGNRTPWEQWGQTTRWPLIQEQVARMHRSKQWRFGPDAMERVDRDGGFIARQLTDTQYLSRIAAQYLSALYTPDEGRRVYAVTGRLTAMLRRLWGLNDILPDHNWVLNPHSNAPKNRLDHRHHAIDAAVVGATTPAMIQQVARAAARAEEQDLDRLFADLPPPWPGFREELQGRIMAAVVSHKPDHGRKGRPLPGRDSTSGRLHNDTAYGFTGRRNAKGMPIVVTRKPLLALKPEDLTDPERIPDPALQGALFEATRGATGKDFEKALRDFSRRDGPYQGIRRIRLTEALNVIPIRDRTGHAYKGVKGDANARFDVWRLPDGKWITRWKDRDGIEHSGIVSLFDAHQPSQVYHRPHPAAKKVLSLRQNDLVAVEHDGDPGKIMRVVKFSANGSITFAPHNEAGPLKTRDTDPADPFRYVTTVASGLKKMRARQVRIDELGKVHDPGPRED

SEQ ID NO: 12121 - protein, 1348 aa, Artificial Sequence
  OMNI-103 CRISPR nuclease
MSIKSDYFLGLDIGTDSIGWAVTDPEYHILRRKGKALWGIRLFDAANTAAERRTFRTSRRRIQRRRQRIRLLQELFAEEMVKLDPGFFQRLSDSAFWQEDKQEQQIYSLFTCENYTDVDYYREYPTIYHLRSALIQEKKEFDLRLLYLALHHLMKHRGHFLFNGSINNVTSFHTTFQTFADCLYDEFDIELECDSEDRFAEILKDKHARKTGKCSELEIICHIEKSNKQLKELFKLITGMKASLSVVFGDDELAEIEHNKISFSESSYDEVRLALEDEIQERTGILDIFHAVYSWAILADILEGGEYEGNSYLSVAKVSTYKKHGDDLRLLRTLVREYCPDHYKSFFSVSGKENYCAYAGTLKKNGKKQPIKRCSQEDFYKALKKLLNQMPTEQPEVKDIFIEIENGTFLPLQVSKDNGVIPYQVNKMELEKILQNAEEYLPFLKNIDEECGKTVSKKIIDLFEFRIPYYVGPLNTAKGENCWMVRKEAGRIYPWNFDEKVDRDQSAEKFIRRMTNQCTYLIHEDVVPKNSLLYSEFMVLNELNNVKIRSEKLPVELKQAIVLDLFKKQKQITGKKLLNYLNANGYDVKKEDLSGFDGNFKSSLSSYLTLKKVFGEELDKYSVQQMAEDIILWITLYGDDQKMLRRVIRKHYEQQLSEEQILSLSKLKFQGWGRLSRRLLSEMEGVDCETGECMTVMQGLRNTQNNLMQLLSQQFSFMELIEEENGNYYVDEITYDNLVKDMVISPSVKRAVWQTVQIVEEIKGVMGCQPKKIFVEMARSDEEKKRTVSRKDRLLEAYDAIKDEARQWQEELQKYSDGDFKAIKLYLYYTQMGQCMYTGRKIDLSQLNDATVWDRDHIYPQSKTKDDSLDNLVLVDRSVNAKKSDGMLSPEIQQRMRATWKYLKEKKLISEKKYERLTRVSPLTDEELAGFINRQLVETRQSSKAVATLLKRVYDEAEIVYVKAEAVSNFRRDNLDYIKVRDLNDYHHAKDAYQNIVVGNVFHEKFTSNPLRWLKNNPNTKYSLNQMFNFDLEKNGVVIWKRGKAGSIKCVEETLKRNDILFTRYAFCNKGGFFNQMLTAAPEDKTKAKGLVPIKKGMETWKYGGYTSVTPSHFMLVASKDKKGKEIRTIETVPLYRWKEFKENPDALLQYCREFYGLKEPKVLIPCIKKNARLVVNGFPMHLKGSTGKQLILQGAVQLCLNNENIKYLKKVTKYLEYNAQRRDKRTLLEVREVTGINKEENIQLYDVFVDKLSNTIYQYRPANPKDNLIKGREKFIELGLAEQCVVLGEVLHLFQCKPLTSDLTLIGGSPNTGTIKITKTISNCNVVKLLSQSIAGVKVREINLLII

SEQ ID NO: 12122 - RNA, 134 nt, Artificial Sequence
  OMNI-50 sgRNA scaffold with g13
ugcucugacacgcggugcagcaguuugagaguuauguaagaaauuacaugacgaguucaaauaaaaauuuauucaaaccgccuauuuauaggccgcagauguucugcauuaugcuugcuauugcaagcuuuuuu

SEQ ID NO: 12123 - RNA, 102 nt, Artificial Sequence
  OMNI-79 sgRNA scaffold with g33
guagcgguguuggcgacuaacaguugccgcuggagaaauccaguuguuaacaagcagcuugacugcaccaaauaaggcgggggcugcggcccucgcuuuuuu

SEQ ID NO: 12124 - RNA, 129 nt, Artificial Sequence
  OMNI-103 sgRNA scaffold with g42
cgcgcggccugcacacgcgucuguuugagaguaguguaagaaauuacacuacaaguucaaauaaaaauuuauucaaauccauuugcuacauuguguagaauuuaaagaucuggcaacagaucuuuuuuu

SEQ ID NO: 12125 - RNA, 129 nt, Artificial Sequence
  OMNI-103 sgRNA scaffold with g43
cgccacugcgcgcuggcgcuggguuugagaguaguguaagaaauuacacuacaaguucaaauaaaaauuuauucaaauccauuugcuacauuguguagaauuuaaagaucuggcaacagaucuuuuuuu

SEQ ID NO: 12126 - RNA, 129 nt, Artificial Sequence
  OMNI-103 sgRNA scaffold with g44
gugucugagcagcagcugcuggguuugagaguaguguaagaaauuacacuacaaguucaaauaaaaauuuauucaaauccauuugcuacauuguguagaauuuaaagaucuggcaacagaucuuuuuuu

SEQ ID NO: 12127 - RNA, 129 nt, Artificial Sequence
  OMNI-103 sgRNA scaffold with g45
gaugucuucaucagcuaccgccguuugagaguaguguaagaaauuacacuacaaguucaaauaaaaauuuauucaaauccauuugcuacauuguguagaauuuaaagaucuggcaacagaucuuuuuuu

SEQ ID NO: 12128 - protein, 9 aa, Artificial Sequence
  HA-Tag
YPYDVPDYA

SEQ ID NO: 12129 - protein, 7 aa, Artificial Sequence
  NLS
PKKKRKV

SEQ ID NO: 12130 - protein, 19 aa, Artificial Sequence
  P2A
ATNFSLLKQAGDVEENPGP

SEQ ID NO: 12131 - protein, 236 aa, Artificial Sequence
  mCherry
MVSKGEEDNMAIIKEFMRFKVHMEGSVNGHEFEIEGEGEGRPYEGTQTAKLKVTKGGPLPFAWDILSPQFMYGSKAYVKHPADIPDYLKLSFPEGFKWERVMNFEDGGVVTVTQDSSLQDGEFIYKVKLRGTNFPSDGPVMQKKTMGWEASSERMYPEDGALKGEIKQRLKLKDGGHYDAEVKTTYKAKKPVQLPGAYNVNIKLDITSHNEDYTIVEQYERAEGRHSTGGMDELYK

SEQ ID NO: 12132 - DNA, 27 bp, Artificial Sequence
  HA-tag
tacccatacgatgttccagattacgct

SEQ ID NO: 12133 - DNA, 21 bp, Artificial Sequence
  NLS
ccaaaaaagaaaagaaaagtt

SEQ ID NO: 12134 - DNA, 57 bp, Artificial Sequence
  P2A
gccaccaacttcagcctgctgaagcaggccggcgacgtggaggagaaccccggcccc

SEQ ID NO: 12135 - DNA, 711 bp, Artificial Sequence
  mCherry
atggtgagcaagggcgaggaggataacatggccatcatcaaggagttcatgcgcttcaaggtgcacatggagggctccgtgaacggccacgagttcgagatcgagggcgagggcgagggccgcccctacgagggcacccagaccgccaagctgaaggtgaccaagggtggccccctgcccttcgcctgggacatcctgtcccctcagttcatgtacggctccaaggcctacgtgaagcaccccgccgacatccccgactacttgaagctgtccttccccgagggcttcaagtgggagcgcgtgatgaacttcgaggacggcggcgtggtgaccgtgacccaggactcctccctgcaggacggcgagttcatctacaaggtgaagctgcgcggcaccaacttcccctccgacggccccgtaatgcagaagaagaccatgggctgggaggcctcctccgagcggatgtaccccgaggacggcgccctgaagggcgagatcaagcagaggctgaagctgaaggacggcggccactacgacgctgaggtcaagaccacctacaaggccaagaagcccgtgcagctgcccggcgcctacaacgtcaacatcaagttggacatcacctcccacaacgaggactacaccatcgtggaacagtacgaacgcgccgagggccgccactccaccggcggcatggacgagctgtacaagtag

1. A method for inactivating alleles of the sterile alpha and toll/interleukin-1 receptor motif-containing 1 (SARM1) gene in a cell, the method comprising
introducing to the cell a composition comprising:
at least one CRISPR nuclease, or a sequence encoding a CRISPR nuclease; and
an RNA molecule comprising a guide sequence portion,
wherein a complex of the CRISPR nuclease and the RNA molecule affects a double strand break in alleles of the SARM1 gene,
wherein the guide sequence portion of the RNA molecule comprises 17-50 contiguous nucleotides.

2. The method of claim 1, wherein the composition is introduced to a cell in a subject or to a cell in culture.

3. The method of claim 1, wherein the cell is a photoreceptor cell, preferably a rod cell or a cone cell.

4. The method of, wherein the CRISPR nuclease and the RNA molecule are introduced to the cell at substantially the same time or at different times.

5. The method of claim 1, wherein alleles of the SARM1 gene in the cell are subjected to an insertion or deletion mutation.

6. The method of claim 5, wherein the insertion or deletion mutation creates an early stop codon.

7. The method of claim 1, wherein the inactivating results in a truncated protein encoded by the inactivated allele.

8. The method of claim 1, wherein guide sequence portion is complementary to a target sequence located from 50 base pairs upstream to 50 base pairs downstream of Exon I, Exon II, Exon III, Exon IV, Exon V, Exon VI, Exon VII, Exon VIII, or Exon IX of the SARM1 gene.

9. The method of claim 1, wherein the guide sequence portion is complementary to a target sequence located from 7 base pairs upstream to 7 base pairs downstream of an Exon of the SARM1 gene, and
a) the Exon is Exon I and the guide sequence portion comprises a sequence that is the same as or differs by no more than 3 nucleotides from a sequence set forth in any of SEQ ID NOs: 1-30, 32, 34, 36-37, 182-229, 1099-1838, 38-67, 230-238, 240-251, 253-257, 259-267, 1839-2531, 69-102, 268-293, 295-300, 302-313, or 2532-3227;
b) the Exon is Exon II, and the guide sequence portion comprises a sequence that is the same as or differs by no more than 3 nucleotides from a sequence set forth in any of SEQ ID NOs: 3228-6803;
c) the Exon is Exon III, and the guide sequence portion comprises a sequence that is the same as or differs by no more than 3 nucleotides from a sequence set forth in any of SEQ ID NOs: 6804-8007;
d) the Exon is Exon IV, and the guide sequence portion comprises a sequence that is the same as or differs by no more than 3 nucleotides from a sequence set forth in any of SEQ ID NOs: 8008-8487;
e) the Exon is Exon V, and the guide sequence portion comprises a sequence that is the same as or differs by no more than 3 nucleotides from a sequence set forth in any of SEQ ID NOs: 8488-9831;
f) the Exon is Exon VI, and the guide sequence portion comprises a sequence that is the same as or differs by no more than 3 nucleotides from a sequence set forth in any of SEQ ID NOs: 9832-10377;
g) the Exon is Exon VII, and the guide sequence portion comprises a sequence that is the same as or differs by no more than 3 nucleotides from a sequence set forth in any of SEQ ID NOs: 10378-11445;
h) the Exon is Exon VIII, and the guide sequence portion comprises a sequence that is the same as or differs by no more than 3 nucleotides from a sequence set forth in any of SEQ ID NOs: 11446-12105; or
i) the Exon is Exon IX, and the guide sequence portion comprises a sequence that is the same as or differs by no more than 3 nucleotides from a sequence set forth in any of SEQ ID NOs: 433-1098.

10. The method of claim 1, wherein the guide sequence portion comprises 17-50 contiguous nucleotides containing nucleotides in the sequence set forth in any one of SEQ ID NOs: 1-12105.

11. A composition comprising an RNA molecule comprising a guide sequence portion comprising 17-50 contiguous nucleotides, wherein the guide sequence portion is complementary to a target sequence located from 50 base pairs upstream to 50 base pairs downstream of Exon I, Exon II, Exon III, Exon IV, Exon V, Exon VI, Exon VII, Exon VIII, or Exon IX of the SARM1 gene.

12. The composition of claim 11, wherein the guide sequence portion is complementary to a target sequence located from 7 base pairs upstream to 7 base pairs downstream of an Exon of the SARM1 gene, and
a) the Exon is Exon I and the guide sequence portion comprises a sequence that is the same as or differs by no more than 3 nucleotides from a sequence set forth in any of SEQ ID NOs: 1-30, 32, 34, 36-37, 182-229, 1099-1838, 38-67, 230-238, 240-251, 253-257, 259-267, 1839-2531, 69-102, 268-293, 295-300, 302-313, or 2532-3227;
b) the Exon is Exon II, and the guide sequence portion comprises a sequence that is the same as or differs by no more than 3 nucleotides from a sequence set forth in any of SEQ ID NOs: 3228-6803;
c) the Exon is Exon III, and the guide sequence portion comprises a sequence that is the same as or differs by no more than 3 nucleotides from a sequence set forth in any of SEQ ID NOs: 6804-8007;
d) the Exon is Exon IV, and the guide sequence portion comprises a sequence that is the same as or differs by no more than 3 nucleotides from a sequence set forth in any of SEQ ID NOs: 8008-8487;
e) the Exon is Exon V, and the guide sequence portion comprises a sequence that is the same as or differs by no more than 3 nucleotides from a sequence set forth in any of SEQ ID NOs: 8488-9831;
f) the Exon is Exon VI, and the guide sequence portion comprises a sequence that is the same as or differs by no more than 3 nucleotides from a sequence set forth in any of SEQ ID NOs: 9832-10377;
g) the Exon is Exon VII, and the guide sequence portion comprises a sequence that is the same as or differs by no more than 3 nucleotides from a sequence set forth in any of SEQ ID NOs: 10378-11445;
h) the Exon is Exon VIII, and the guide sequence portion comprises a sequence that is the same as or differs by no more than 3 nucleotides from a sequence set forth in any of SEQ ID NOs: 11446-12105; or
i) the Exon is Exon IX, and the guide sequence portion comprises a sequence that is the same as or differs by no more than 3 nucleotides from a sequence set forth in any of SEQ ID NOs: 433-1098.

13. The composition of claim 11, wherein the guide sequence portion comprises 17-50 contiguous nucleotides containing nucleotides in the sequence set forth in any one of SEQ ID NOs: 1-12105.

14. The composition of claim 11, further comprising a CRISPR nuclease and/or further comprising a transactivating CRISPR RNA (tracrRNA) molecule.

15. (canceled)

16. The composition of claim 14, wherein the CRISPR nuclease and RNA molecule or CRISPR nuclease, RNA molecule, and tracrRNA molecule form a complex.

17. A medicament comprising the composition of claim 14 for use in inactivating a SARM1 allele in a cell, wherein the medicament is administered by delivering to the cell the composition of claim 14.

18. Use of the composition of claim 14 for treating, ameliorating, or preventing retinitis pigmentosa, photoreceptor degeneration, or age-related macular degeneration, comprising delivering the composition of claim 14 to a subject experiencing or at risk of experiencing retinitis pigmentosa, photoreceptor degeneration, or age-related macular degeneration.

19. A medicament comprising the composition of claim 14 for use in treating, ameliorating, or preventing retinitis pigmentosa, photoreceptor degeneration, or age-related macular degeneration, wherein the medicament is administered by delivering the composition of claim 14 to a subject experiencing or at risk of experiencing retinitis pigmentosa, photoreceptor degeneration, or age-related macular degeneration.

20. A kit for inactivating a SARM1 allele in a cell, comprising the composition of claim 14 and instructions for delivering the composition to the cell.

21. A kit for treating or preventing retinitis pigmentosa, photoreceptor degeneration, or age-related macular degeneration in a subject, comprising the composition of claim 14 and instructions for delivering the composition to a subject experiencing or at risk of experiencing retinitis pigmentosa, photoreceptor degeneration, or age-related macular degeneration.
